(19) United States
(12) Patent Application Publication
(10) Pub. No.: US 2004/0214783 A1
(43) Pub. Date: Oct. 28, 2004

(54) Compositions and methods for treatment of neoplastic disease

(76) Inventor: David S. Terman, Pebble Beach, CA (US)

Correspondence Address: VENABLE, BAETJER, HOWARD AND CIVILETTI, LLP, P.O. BOX 34385, WASHINGTON, DC, 20043-9998, US

(21) Appl. No.: 10/428,817

(22) Filed: May 5, 2003

Related U.S. Application Data
(60) Provisional application No. 60/378,988, filed on May 8, 2002.
(60) Provisional application No. 60/389,366, filed on Jun. 15, 2002.
(60) Provisional application No. 60/406,697, filed on Aug. 28, 2002.
(60) Provisional application No. 60/406,750, filed on Aug. 29, 2002.
(60) Provisional application No. 60/415,310, filed on Oct. 1, 2002.
(60) Provisional application No. 60/415,400, filed on Oct. 2, 2002.
(60) Provisional application No. 60/438,686, filed on Jan. 9, 2003.

(51) Int. Cl. A61K 31/704

(52) U.S. Cl. 514/33; 514/26

(57) ABSTRACT

Compositions and methods for treating a tumor, neoplastic disease or infectious disease in a subject are based on superantigens in the form of polypeptides including fusion polypeptides or conjugates, homologues, and fragments, all of which induce a tumoricidal response when administered directly into tumor or an organ sheath or body cavity affected by the tumor. Nucleic acid constructs encoding the foregoing polypeptides are also used in antitumor therapy. The above agents may be administered in sustained release or controlled release vehicles at or near sites of tumors in a tumor-bearing subject.

### BACKGROUND OF THE INVENTION

[0001] 1. Field of the Invention

[0002] The invention relates generally to immunotherapeutic compositions and methods for treating tumors and cancer. The methods are based on the expression of superantigen (“SAg”) alone or in combination with other molecules in transfected host cells (tumor cells, accessory cells or lymphocytes). Other therapeutic methods are based on administering T cells which are activated by cells engineered to express SAg and other immunostimulatory molecules and structures.

[0003] 2. Description of the Background Art

[0004] Therapy of the neoplastic diseases has largely involved the use of chemotherapeutic agents, radiation, and surgery. However, results with these measures, while beneficial in some tumors, has had only marginal effects in many patients and little or no effect in many others, while demonstrating unacceptable toxicity. Hence, there has been a quest for newer modalities to treat neoplastic diseases.

[0005] In 1980, tumoricidal effects were demonstrated in four of five patients with advanced breast cancer treated with autologous plasma that had been perfused over columns in which Staphylococcal Protein A was chemically attached to a solid surface (Terman et al., New Eng. J. Med., 305:1195 (1981)). While the initial observations of tumor killing effects with the immobilized Protein A perfusion system have been confirmed, some have obtained inconsistent results.

[0006] The explanation of these inconsistencies appears to be as follows. First, commercial Protein A is an impure preparation, as evident from polyacrylamide gel electrophoresis and radioimmunoassays that detected Staphylococcal enterotoxins in the preparations. Second, various methods of immobilizing Protein A to solid supports have been used, sometimes resulting in loss of biological activity of the perfusion system. Third, the plasma used for perfusion over immobilized Protein A has often been stored and treated in different ways, also resulting in occasional inactivation of the system. Moreover, the substance(s) or factors responsible for the anti-tumor effect of this extremely complex perfusion system have not been previously defined.

[0007] The system contained an enormous number of biologically active materials, including the Protein A itself, Staphylococcal proteases, nucleases, exotoxins, enterotoxins and leukocidin, as well as the solid support and coating materials. In addition, several anaphylatoxins were generated in plasma after contact with immobilized Protein A. Finally, it was speculated that the biological activity of the system was due to the removal from the plasma by the Protein A of immunosuppressive immune complexes that otherwise inhibit the patient's antitumor immune response.

[0008] The Staphylococcal enterotoxins that contaminate the Protein A columns are a family of extracellular products of Staphylococcal aureus that belong to a well recognized group of proteins that have common physical and chemical properties. The enterotoxins produce a number of characteristic effects in humans and animals, such as emesis, hypotension, fever, chills, and shock in primates and enhancement of gram negative endotoxic lethality in rabbits. At least some of these effects are due to the ability of these proteins to act as extremely potent T cell mitogens.

[0009] Staphylococcal enterotoxins are representative of a family of molecules known as SAgs which are the most powerful T cell mitogens known. They are capable of activating 5 to 30% or the total T cell population compared to 0.01% for conventional antigens. Moreover, the enterotoxins elicit strong polyclonal proliferation at concentrations 10³-fold lower than conventional T cell mitogens. The most potent enterotoxin, Staphylococcal enterotoxin A (SEA), has been shown to stimulate DNA synthesis in human T cells at concentrations of as low as 10⁻¹³ to 10⁻¹⁶M. Enterotoxin-activated T cells produce a variety of cytokines, including IFN, various interleukins and TNF. Enterotoxins stimulate several other cell populations involved in innate and adaptive immunity which also play a major role in anti-tumor immunity. For example, enterotoxins engage the variable region of the TCR chain on exposed face of the pleated sheet and the sides of the MHC class II molecule.

[0010] The SAg is capable of augmenting the TH-1 cytokine response by CD4+ cells while also activating NKT and NK cells and γ/δ T cells. NK cell cytotoxicity is augmented by IFN-γ produced by SAg activated T cells. NKT cells are known to be activated by SAgs, peptides, α-galactosylceramides and lipoarabinomannans presented on CD1 receptors. Evidence points to an invariant lectin like recognition unit on the NKT cell chain as a specific ligand for galactosylceramide determinants on tumor cells. SAgs induce tumor killing in vivo when given alone or conjugated to tumor associated antibodies. They are also effective when employed ex vivo to produce tumor sensitized T cells or γ/δ T cells for the adoptive therapy of MCA 205/207 tumors. SAg transfected tumor cells have shown a capacity to reduce metastatic disease in a murine mammary carcinoma model.

[0011] In addition to these common biological activities, the Staphylococcal enterotoxins share common physicochemical properties. They are heat stable, trypsin resistant, and soluble in water and salt solutions. Furthermore, the Staphylococcal enterotoxins have similar sedimentation coefficients, diffusion constants, partial specific volumes, isoelectric points, and extinction coefficients. The Staphylococcal enterotoxins have been divided into five serological types designated SEA, Staphylococcal enterotoxin B (SEB), Staphylococcal enterotoxin C (SEC), Staphylococcal enterotoxin D (SED), and Staphylococcal enterotoxin E (SEE), which exhibit striking structural similarities. The enterotoxins are composed of a single polypeptide chain of about 30 kilodaltons (kD). All staphylococcal enterotoxins have a characteristic disulfide loop near the middle of the molecule. SEA is a flat monomer consisting or 233 amino acid residues divided into two domains. Domain I comprises residues 31-116 and domain II of residues 117-233 together with the amino tail 1-30. In addition, the biologically active regions of the proteins are conserved and show a high degree of homology. One region of striking amino acid sequence homology between SEA, SEB, SEC, SED, and SEE is located immediately downstream (toward the carboxy terminus) from the cysteine located at residue 10⁶ in SEA. This region is thought to be responsible for T cell activation. A second homologous region that begins at residue 147 and extends downstream is highly conserved. This region is believed to mediate emetic activity. The region related to emetic activity can be omitted from enterotoxins used as therapeutics.

[0012] A sequence analysis of the Staphylococcal enterotoxins with other toxins has revealed SEA, SEB, SEC, SED, Staphylococcal toxic shock-associated toxin (TSST-1 also known as SEF), and the Streptococcal exotoxins share considerable nucleic acid and amino acid sequence homology. The enterotoxins belong to a common generic group of proteins thought to be evolutionarily related.

[0013] Enterotoxins bind to MHC Class II molecules and the T cell receptor (“TCR”) in a manner quite distinct from conventional antigens. Enterotoxins engage the variable region of the TCR β chain on an exposed face of the β pleated sheet and the sides of the MHC Class II molecule, rather than engaging the groove of the Class II molecule like conventional antigens. In contrast to SEB and the SEC, which have only the capacity to bind to the MHC class II α chain, SEA, as well as SEE and SED, also interacts with the MHC class II β chain in a zinc dependent manner T cell recognition is based on the presence of the β chain and is therefore independent of other TCR components and diversity elements. Single amino acid positions and regions important for SAg-TCR interactions have been defined. These residues are located in the vicinity of the shallow cavity formed between the two domains. The alanine substitution of amino acid residue Asn23 in SEB has demonstrated the importance of this residue in SEB/TCR interaction. This particular residue is conserved among all of the Staphylococcal enterotoxins and may constitute a common anchor position for enterotoxin interaction with TCR Vβ chains. Amino acid residues in positions 60-64 have also been shown to contribute to the TCR interaction as do the cysteine residues forming the intermolecular disulfide bridge of SEA. For SEC2 and SEC3, the key points of interaction in the Vβ chain are located in the CDR1, CDR2 and HRV4 TCR Vβ-3 chain. Hence, multiple and highly variable parts of the Vβ chain contribute to the formation of the enterotoxin binding site on the TCR. Thus far, a single and linear consensus motif in the TCR Vβ displaying a high affinity interaction with particular enterotoxins has not been identified. A significant contribution of the TCRα chain in enterotoxin-TCR recognition is acknowledged as well as MHC class II isotypes. This distinctive binding mechanism of enterotoxins which bypasses the highly variable parts of the MHC class II and TCR molecules allows them to activate a high frequency or T cells with massive lymphoproliferation, cytokine induction and cytotoxic T cell generation. These properties are shared by other proteins made by infectious agents. Together, these proteins form a well recognized group known as SAgs.

[0014] There are two general classes of SAgs. The first includes minor lymphocyte stimulating (MLS) antigens. The second class of SAgs includes mycoplasmal, viral, and bacterial proteins such as the Staphylococcal enterotoxins and streptococcal exotoxins. All SAgs have the following properties. T cell activation does not require antigen processing. There is no MHC restriction of responding T cells. SAgs bind to and evoke responses from all T cells expressing V receptors, without requiring other TCR or diversity elements. CD4-CD8-α/β+T cells and γ/δT cells are also capable of responding to SAgs by proliferating, producing TH1 cytokines and exhibiting cytotoxic activity. The SAgs induce a biochemically distinct T cell activation pathway. Thus, SAgs interact with and activate a much larger proportion of T cells than conventional antigens, causing massive lymphoproliferation, cytotoxic T cell generation, and cytokine secretion. A given SAg can activate up to 30% of resting T cells compared to 0.01% for conventional antigens. As highly representative members of this family of SAgs, the enterotoxins share these characteristics.

[0015] The present invention features the use of SAgs in association with molecules to produce tumor killing effects. The SAgs are useful in peptide form and may combine with another peptide or nucleic acid to form a conjugate. The effect of the combined molecules is synergistic. These conjugates are useful when administered as a preventative or therapeutic antitumor vaccine in tumor bearing patients. Alternatively, they may be used ex vivo to load an antigen presenting cell as a means of immunizing a T. γ/δ, NK or NKT cell population for use in adoptive therapy of cancer. Examples of such conjugates are complexes between: SAg and glycosylceramide; SAg and apolipoproteins (Lp(a)), SAg and oxyLDL, SAg and verotoxins, SAg and GPI-ceramide (with phytosphingosine backbone), SAg and lipopolysaccharide (LPS), SAg and peptidoglycan, SAg and mannan protcoglycan, SAg and muramic acid, SAg and phytosphingolipid, SAg and tumor peptides. Also intended are SAg and Gal conjugates and glycosylated SAgs.

[0016] The present invention features the use of SAg in association or conjugated to oxidized low density lipoproteins (oxyLDL) and apolipoproteins (e.g., lipoprotein (a) (Lp(a)). OxyLDL and its byproducts bind to receptors on sinusoidal endothelial cells in the tumor microcirculation where they induce apoptosis, increase levels of tissue factor and activated thrombin, upregulate adhesion molecules and produce a prothrombotic state. Lp(a) is densely deposited in tumor microcirculation and as a competitive inhibitor of plasminogen is prothrombotic. Hence, both apolipoproteins and oxyLDL not only home to receptors on the tumor microcirculation but they also induce endothelial cell or macrophage apoptosis as well as a prothrombotic state. These local effects are amplified by the presence of the conjugated superantigen which induce a localized T cell immune and inflammatory response collectively resulting in a potent anti-tumor response.

[0017] The present invention also features the use of the SAg in association or conjugated to verotoxins. The latter molecules have the capacity to bind to galactosylceramide receptors on tumor cells and induce apoptosis. Hence, the tumor targeting and apoptosis inducing functions of the verotoxin are coupled with the T cell immune and inflammatory response induced by the SAgs to produce a potent and well localized anti-tumor response.

[0018] The present invention features the use of SAgs in association or conjugated to mono or digalactosylceramides. The latter have been isolated from human kidney, Fabry's disease kidney, marine sponge Aegelus mauritanius and is expressed in certain bacteria such as Sphingomonas paucimobilis. They have been shown to activate NKT cells and to induce anti-tumor effects in vivo against several types of tumors. The activation of NKT cells in the presence of the mono and digalactosylceramides appears to be IL-12 dependent. The biological activity of the -galactosylceramides is observed in both mono and digalactosylceramide forms and is dependent upon the presence of an anomeric configuration on the terminal galactose. The lengths of the sphingosine base and fatty acyl chains of 23 and 15 respectively also appear to be optimal for production of the anti-tumor effects. SAg is also used in association with phytosphingosine which is expressed in Saccharomyces cerevisiae membranes and vesicles.

[0019] SAgs are known to be the most powerful T cell mitogens known and have been shown to produce anti-tumor effects in several animal models. The -galactosylceramides are known to be potent inducers of NKT cell activation which have been shown to produce an anti-tumor effect in an IL-12 dependent manner. In the present invention SAgs are combined with -galactosylceramides biochemically as conjugates and genetically within a cell which expresses the newly synthesized protein-bound galactosylceramide on the cell surface. The newly synthesized conjugates in native form or expressed in or on the cell produce a synergistic anti-tumor effect due to the activation of T cells and NKT cell populations.

[0020] Furthermore, in the present invention the SAg-galactosylceramides are expressed in tumor cells, dendritic cells (“DC”) or a hybrid cell made by fusing a tumor cell and a DC. The use of DCs or DC/tumor cell hybrids (DC/tc) to present the SAg-galactosylceramides fusion constructs or conjugates provides the optimal costimulation for activation of a tumor specific T cell population. The use of a tumor cell or a DC/tc provides in addition to costimulation, expression of the tumor antigen, itself to activate anti-tumor T and NKT cell clones which are tumor specific. Hence, an optimal cell is a DC/tc which expresses SAg and SAg-anomeric galactosylceramides.

[0021] The SAg-galactosylceramide conjugates are useful in the present invention. However, there are distinct differences and advantages to producing and expressing the SAg-αgalactosylceramide conjugates within a cell. First, final products are quite different. One involves the enterotoxin-α-galactosylceramide in free form whereas the other involves cell associated enterotoxin-αgalactosylceramide which includes enterotoxin nucleic acids and peptides. In the cell both enterotoxins and α-galactosylceramides are associated with numerous intracellular and membrane structures such as MHC, costimulatory and adhesion molecules, heat shock proteins, membrane glycolipids and glycosphingolipids which may improve immunogenicity and antigen presentation. They may also be transported in various vesicles and exosomes which may provide additional immunogenicity. With the addition of appropriate signals sequences and association with molecules involved in the antigen presenting pathways such as the invariant chain, TAP and LAMP molecules, the conjugates may be routed in the cell to the MHC class I, class II or CD1 receptor. Therefore, enterotoxin and α-galactosylceramides produced within a cell are presented to the host's immune system in an entirely different form compared to the purified enterotoxin polypeptide.

[0022] Unlike free enterotoxin polypeptide or -galactosylceramide, SAg transfected tumor cells, DCs or DC/tc present enterotoxins to the T cell system in association and or conjugated to tumor associated antigens including mutated normal structures or fusion structures, costimulatory and adhesion molecules. Indeed, the coadministration of SAg with tumor antigen would be expected to produce a heightened response to the tumor antigens while preventing the clonal deletion which occurs with SAg alone. Liu et al., Proc. Natl. Acad. Sci., 88: 8705-8709, (1991); McCormack et al., Proc. Natl Acad. Sci., 91: 2086-2090, (1994); Coppola et al., Int. Immunol., 9: 1393-403, (1997). Hence, the coadministration of SAg-galactosylceramide and tumor associated antigens would induce a predictably heightened tumor specific response by the host. This prediction was borne out by the Applicant's work showing that SAg transfection of tumor cells abolished the tumorigenicity of 4T 1 mammary carcinoma cells, significantly reduced the number of established metastases and prolonged survival compared to untreated controls. (Pulaski, Terman, et al., American Association of Cancer Research, April 1999; Cancer Research in press 2000).

[0023] SAg transfected tumor cells in vivo are effective in an additional manner which does not apply to SAg polypeptide. Ingestion of apoptotic cells by DCs augments the immunogenicity of tumor cells. Fields et al., Proc. Natl. Acad. Sci., 95: 9882-9887, (1998); Albert et al., Nature, 392: 86-89, (1998). DCs are acknowledged as the premier accessory cell for antigen presentation. They have been shown to ingest apoptotic cells and nucleic acids and process them for presentation to host T cells in the context of costimulation, adhesion and MHC molecules. Akbari et al., J. Exp. Med., 189: 169-177, (1999). Therefore, following apoptosis of SAg transfected tumor cells and ingestion by DCs, SAg-encoding nucleic acid as well as tumor associated nucleic acids in the transfected cells would produce additional anti-tumor responses. Purified polypeptide enterotoxins do not share with the SAg transfectants this property of enhanced immunogenicity following ingestion and processing by DCs.

[0024] There are enormous structural and functional differences between the polypeptide enterotoxin and SAg-transfected tumor cells. The starting materials are different, i.e., peptides vs nucleic acids and the product is different, i.e., polypeptide vs enterotoxin transfected cell in which the SAg is may exist in nucleic acid and peptide form associated with a vast number of intracellular and membrane structures. Some of these structures may actually improve the T cell activating function of SAgs such as deoxyribonucleic acids, ribonucleic acids, tumor associated antigens, heat shock proteins, costimulatory molecules and adhesion molecules and endosomes. Cellular SAg peptides or nucleotides exist in association with tumor associated antigens, costimulants, adhesion molecules, heat shock proteins and MHC molecules, GPI-ceramides or SAg receptors (digalactosylceramides) which improve the immunogenicity of the tumor antigens. Therefore, these structural and functional differences between the polypeptide SAg and the enterotoxin transfected tumor cells clearly show that SAg transfected tumor cells have a far greater potential than the polypeptide to induce a tumor specific response.

[0025] Moreover, SAg transfected tumor cells possess an additional unique property not shared by the polypeptide SAg. SAg-transfected tumor cells display the metastatic phenotype of the tumor cells which enables them to colonize and traffic to metastatic sites in vivo. Once localized to micrometastatic sites the transfectants expressing SAg induce a potent tumor specific T cell response. In contrast, the purified polypeptide SAg unassociated with a tumor cell would have no capacity whatsoever to colonize metastatic sites.

[0026] The present invention also provides SAg-encoding nucleic acid, preferably DNA, fused with (or cotransfected with) a nucleic acid encoding another molecule. The transfected cells include tumor cells, accessory cells e.g., DCs, tumor cell/accessory cell (e.g., DC) hybrids. The expression of molecules in addition to enterotoxins by these cells serves the following function:;

[0027] 1) enhance the immunogenicity of the SAg transfected cell by providing nucleic acids encoding an additional potent immunogen. Examples would include tumor associated antigens or mutated normal antigen or fusion peptides in tumor cells, an immunogenic bacterial product such as Staphylococcal adhesin protein A, LPS, β-glucans, and peptidoglycans, costimulatory and adhesion molecules, heat shock protein, growth factor receptors such as Her/neu and tumor markers such as PSA.

[0028] 2) assist in tumor killing activity by the SAg transfected cell when localized to tumor sites by providing nucleic lacids encoding the following: angiogenesis antagonists, chemoattractants such as C5a, chemokines such as RANTES, hyaluronidase and coagulase and CD44 isoforms.

[0029] 3) Increase the binding of immunogenic substances to the surface of the SAg transfected cell by providing nucleic acids encoding the following: CD1 receptors, CD14 receptors, SAg receptors

[0030] 4) increase the production of SAg in the SAg transfected cell by providing nucleic acids encoding the following: cell cycle proteins, amplified oncogenes, and signal transduction molecules.

[0031] 5) assist in trafficking of SAg to class I or class II pathway in the SAg transfected cell by providing nucleic acid encoding the following: the invariant chain, the LAMP1 proteins and TAP proteins.

[0032] 6) induction of a local tumoricidal response by intratumoral injection of nucleic acids encoding the following: oxyLDL receptor and SAg receptor, chemoattractants, chemokines.

[0033] The present invention also provides for augmented tumoricidal responses by immunocytes particularly T, γ/δ T, NK, and NKT cells. Inhibitory receptors or their tyrosine-based inhibitory motifs on T, γ/δ T, NK, and NKT cells with specificity for lipid-based tumor associated antigens (LBTAAs) are deleted or functionally deactivated (antisense or gene knockout) which permits unopposed intracellular signaling by the activation receptors and enhanced responsiveness to LBTAAs and their respective tumors of origin. Inhibition of inhibitory receptor phosphorylases (SHP or SHIP) and/or ITIM binding sites on activation receptors (ITAM) is also contemplated as a means of augmenting the host response to LBTAAs.

### SUMMARY OF THE INVENTION

[0034] The present invention comprises a method for treating cancer in a host comprising providing conjugates, fusion proteins or naked nucleic acids of superantigen and additional molecule(s) which produce an tumoricidal response. The additional molecule serves the following functions: 1) to target a receptor (digalactosylceramide) expressed on tumor cells in vivo and induce tumor cell apoptosis e.g., SAg-verotoxin conjugates. 2) to target receptors expressed on tumor sinusoidal endothelium, induce apoptosis and a prothrombotic state e.g. SAg-oxyLDL conjugates and SAg-Lp(a) conjugates 3) to activate a dormant population of tumoricidal NKT cells e.g. SAg-digalactosylceramides, SAg-GPI-digalactosylceramide (phytosphingosine) complexes. 4) target receptors for integrins expressed on tumor microvasculature e.g., SAg-RED conjugates. 5) naked DNA administered intratumorally induces tumor cell expression in vivo of receptors for ligands which produce apoptosis and inflammation e.g., naked DNA SAg-oxyLDL receptor, SAg-LOX-1 receptor, SAg-SREC receptor.

[0035] Sickled erythrocytes are useful in the present invention since they have natural ligands for integrins expressed on tumor neovasculature which facilitates their targeting to the tumor endothelium. Sickled erythrocyte membranes acquire oxyLDL using fusigenic techniques with oxyLDL containing liposomes and apoproteins via gene transfection in the nucleated pre-reticulocyte phase. The oxyLDL and apoproteins expressed by the sickled cells facilitates targeting to oxyLDL, LOX-1 and SREC receptors present on the tumor microvasculature. These erythrocytes are also useful for carrying nucleic acids for transfection of the tumor endothelial cells in vivo. Vesicles derived from sickled erythrocytes are more rigid, prothrombotic and target the tumor microvasculature more effectively than the parent cell. They also carry oxyLDL to receptors on tumor endothelium. Likewise, vesicles, exosomes or SAg-GPI-digalactosylceramides shed from SAg transfected tumor cells are capable of inducing potent tumoricidal responses and are useful in the present invention.

[0036] In addition, bacterial and yeast expression and phage display systems are useful for the presentation of SAg in association with other anti-tumor molecules. The yeast sec mutant or yeast display is used to produce a SAg-ceramide conjugate exhibiting a phytosphingosine in the sphingosine portion of the ceramide. This structure activates both T cell, γ/δ T, NK cell and NKT cells. Sphingomonas paucimobilis which naturally expresses a α-galactosylceramide is transfected with SAg nucleic acids which results in the shedding of SAg-α-galactosylceramide complexes which are use to produce a population of tumoricidal T cells, γ/δT, NK cells and NKT cells. SAg phage displays with tumor localizing molecules e.g. RED sequences are used to target SAgs to tumor microvasculature. SAg phage displays with similar tumor localizing molecules comprising tumor or tumor endothelial cell apoptosis inducing agents e.g., thrombospondin or oxyLDL are use to increase the tumoricidal response.

[0037] The present invention comprises a method for treating cancer in a host comprising providing cells transfected with a gene that express and/or secretes a SAg or T cells activated by the transfected cells to the host. The cells are transfected in vivo or in vitro. SAgs may activate T cells, γ/δ T or NKT or NK cells in the host. These same transfectants may be used to stimulate a population of T cells, γ/δ T cells or NKT cells ex vivo which are provided to the host as tumor specific effector cells in adoptive immunotherapy. The transfected cells may be, for example, tumor cells accessory cells, DCs muscle cells, immunocytes, fibroblasts. When transfected in vitro the cells can be xenogeneic to the host, from the same species as the host or host cells.

[0038] For in vivo immunization, tumor cells are transfected with nucleic acids encoding SAgs together with a carbohydrate modifying enzyme such as α-galactosyl transferase to produce the α-Gal epitope, Staphylococcal hyaluronidase, Streptococcal capsular polysaccharide, Staphylococcal erythrogenic toxin, Staphylococcal Protein A, Staphylococcal βhemolysin, Staphylococcal coagulase, costimulants such as B7-1 and B7.2, chemoattractants and chemokines. SAgs are also cotransfected into tumor cells with gene clusters encoding the biosynthesis of highly immunogenic microbial Lipid A, membrane or capsular polysaccharides, lipoproteins and peptidoglycans. Nucleic acids are useful when transfected alone. However combinations are preferred. The cotransfection into tumor cells of the SAg-encoding nucleic acid together with the nucleic acids encoding αGal or GalCer biosynthesis is particularly useful. The cotransfection into tumor cells of the nucleic acid encoding SAg with nucleic acids encoding Staphylococcal erythrogenic toxins and hyaluronidase allows the transfected tumor cells to simulate the in vivo inflammatory activity of a Staphylococcus or leukocyte or macrophage by secreting enzymes and toxins which induce a sterile cellulitis in tumor sites.

[0039] Further provided are tumor cells transfected with nucleic acid encoding structures such as the erb/Neu gene which upon administration to the host promotes tumor cell trafficking and colonization of micrometastatic sites. Amplified oncogenes linked to SAg nucleic acids provide the locus and energy for expression or overexpression of both gene products. Thus, provided herein are tumor cells transfected with SAg-encoding nucleic acid together with nucleic acid encoding other oncogenes, amplified oncogenes and transcription factors, angiogenic factors such as angiostatin, angiogenesis receptors such as VEGF, tumor growth factors, tumor suppressors, cell cycle proteins and key proteins engaged in the antigen routing and processing pathway. In one example, the microbial SAg and erb/Neu nucleic acids are cotransfected into tumor cells. These nucleic acids may also linked to an inducible gene such as that encoding metallothionein or corticosteroid receptors. In this way, the cells are activated by exogenous delivery of corticosteroids or a heavy metal only after a suitable period of time has lapsed to allow them to localize in metastatic sites in vivo

[0040] Tumor cell transfectants are also useful ex vivo to immunize a T cell, γ/δ T cell or NKT cell population producing tumor specific effector cell population for adoptive immunotherapy of cancer. These immunizing tumor cells are transfected with nucleic acids encoding SAgs and the SAg receptor. The latter transfectants are capable of binding exogenous SAg for presentation to a T cell population. In addition, tumor cells are transfected with nucleic acids encoding CD1 receptors which are capable of binding exogenous glycosylceramides and lipoarabinans free or bound to SAgs for presentations to T, γ/δ or NKT cells. Similarly, tumor cells are transfected with nucleic acids encoding the CD14 receptor which bind exogenous peptidoglycans and LPS's, free or bound to SAgs for presentation to T cells.

[0041] Likewise, the nucleic acids encoding the mannose receptor are transfected into tumor cells which are capable of binding a broad range of glycosylated SAgs for presentation to T cells. The present invention provides detailed methods for preparation of the SAg-glycosylceramide, SAg-LPS, SAg-peptidoglycan complexes as well as glycosylated SAgs which are loaded onto their respective receptors expressed on tumor cells, accessory cells and, in some instances, immunocytes. For ex vivo use, any prokaryotic or eukaryotic cell may be used which is transfectable with nucleic acid encoding SAgs to provide surface expression of the SAg or constructs expressed on tumor, accessory cell or immunocyte transfectants. When the transfected cells are not host tumor cells, the cells additionally express a tumor associated antigen expected to be present on the host's cancer cells.

[0042] Also provided is a tumor specific T cell, γ/δ, NK or NKT cell (collectively immunocyte) population which is activated by SAgs, SAgs conjugates given above or the tumor cell transfectants given above to produce a population of tumor specific effector cells useful in adoptive immunotherapy. A particularly effective method of producing a hyperresponsive immunocyte population is to delete (e.g. gene knockout) or inactivate (e.g. antisense) receptors on immunocytes or their respective immune receptor tyrosine-based inhibitory motifs (ITIMs) which inhibit cellular activation by receptors specific for lipid-based tumor associated (Lip-TAAs) and/or superantigens. After exposure to Lip-TAAs and/or superantigens, the immunocyte activation receptor response is unopposed by an inhibitory signal in which case immunocytes readily differentiate into tumor specific effector cells which are highly reactive even to weak Lip-TAAs.

[0043] After ex vivo stimulation, the T cells, γ/δ T cells or NKT cells used for adoptive immunotherapy should preferentially express CD44 which indicates that they are capable of trafficking and homing to tumor sites. Additionally, the T cell population used for ex vivo immunization is engineered to overexpress the TCR variable Vβ and invariant Vα sites specific for SAg and glycosylceramide binding respectively and to produce IFN by exogenous delivery of corticosteroids or a heavy metal. A particularly useful population of therapeutic tumor specific effector T cells or NKT cells which demonstrates overexpressed CD44 together with Vβ variable and Vα invariant regions and high IFN production. Also provided are methods for reactivating anergic T cells in cancer patients by transfecting nucleic acids encoding the SAg receptors to produce a T cell population which may now be stimulated with exogenous SAgs.

[0044] Compositions which mimic SAgs are used in place of native SAgs for in vivo administration in order to circumvent the problem of naturally occurring SAg-specific antibodies. The SAg mimics are largely comprised of nucleotides or oligonucleotide-peptide chimeric constructs which are specific for tumor cells expressing SAg receptors (via the nucleotide) while retaining their SAg specificity for the TCR (via the peptide). The class II binding site of the SAg may optionally be eliminated or mutated to minimize SAg peptide binding to MHC class II receptors in vivo. The molecule may be composed entirely of nucleotides for which there are no naturally-occurring antibodies. In addition, carriers are provided for in vivo transfection of tumors by nucleic acids encoding SAgs or other nucleic acid constructs given in Table I. Phage displayed tumor neovasculature ligands may also carry nucleic acids encoding SAgs or other constructs.

[0045] The constructs and method are used to treat any solid tumor such as carcinoma, melanoma and sarcoma or cancer of hemopoietic origin, such as lymphomas and leukemias which may or may not form solid tumors.

[0046] Unless otherwise defined, all technical and scientific terms used herein have the same meaning as commonly understood by one of ordinary skill in the art of this invention. Although methods and materials similar or equivalent to those described herein can be used in the practice or testing of the present invention, suitable methods and materials are described below. All publications, patent applications, patents, and other references mentioned herein are incorporated by reference in their entirety. In case of conflict, the present specification, including definitions, will control. In addition, the materials, methods, and examples are illustrative only and not intended to be limiting. Other features and advantages of the invention will be apparent from the following detailed description and from the claims.

### BRIEF DESCRIPTION OF THE DRAWINGS

[0047] FIG. 1. Schematic diagram of the cloning of the SEB gene into the pHβ Apr1-neo vector. The coding region of the SEB gene was amplified with PCR primers. The upstream primer (SEB1) has a SalI site at its 5′ end and the downstream primer (SEB2), a BamHI site. Both the pHβ Apr1-neo vector and the amplified SEB insert were digested with SalI and BamHI, ligated and transformed into XL1-Blue competent cells. The final construct was verified by restriction enzyme and sequence analyses.

[0048] FIG. 2. Cloning of the SEB gene into the pHβ-Apr1 neo vector. Clones 1-5 contained the SEB insert (coding region 801 bp) and the pH β-Apr1 neo vector (10 kb). All DNA was digested with SalI and BamHI and electrophoresed on a 1% agarose gel in 1× TAE buffer.

[0049] FIG. 3. Protection of mice from tumor growth by DNA immunization with nuclcic acid encoding a fusion of human papilloma virus HPV16 oncoprotein (E7) with SEB. C57BL/6 mice were immunized i.d. by particle bombardment (gene gun) with control vector, E7 alone, SEB-E7 and E7-SEB fusion genes. Mice were challenged with syngeneic TC-1 tumor cells transfected with E7 or another HPV oncoprotein, E6. Mice receiving the SEB-E7 fusion gene showed complete protection against challenge. Mice receiving E7-SEB (fusion protein in reverse order), E7 only, SEB and vector all developed tumors.

[0050] FIG. 4. Protection of rabbits from growth of papilloma tumor caused by cottontail rabbit papillomavirus (CRPV). Inbred EIII/JC rabbits were immunized with DNA by the route of FIG. 3. Groups were given CRPV E1 or E6, DNA, SEB DNA, and fusions of SEB with E1 or E6. Rabbits were challenged with CRPV and tumor development was monitored. The SEB-E1 fusion DNA was the most effective in inhibiting the growth of the outgrowth of CRPV-induced papillomas.

### DESCRIPTION OF THE PREFERRED EMBODIMENTS

[0051] The present invention provides methods and materials for treating cancer related to the polypeptide or nucleic acid conjugates or fusions comprising SAg with other molecules that synergize or cooperate with SAg in the induction of an anti-tumor response. The present invention also provides materials and methods for treating cancer related to transfection of cells with nucleic acid that encode a SAg and/or another polypeptide. The cells can be transfected in vivo or in vitro. The expression of the SAg polypeptide activates host immunocytes, such as various T cell subsets, including γ/δ T cells, as well as NK and NKT cells.

[0052] As used herein, T cells are defined as any class of lymphocytes that undergo maturation and differentiation in the thymus. They may express various chains of the T cell receptor (TCR). They include, but are not limited to NK cells, NKT cells and TCR α/β+ T cells, TCR γ/δ+ T cells and may be known as cytotoxic T cells, T helper cells, suppressor or regulatory T cells, or they may be defined by the expression or type of T cells markers (e.g., CD3, CD4, CD8) or TCR chains that they express.

[0053] Various useful therapeutic constructs involving superantigen compositions, and some of the preferred conditions of use are listed in Table I, below.

TABLE I
Therapeutic Constructs and Preferred Conditions of Use

| I. | CELLS: | | Tumor Cells, DCs or DC/Tumor Cell Hybrids (DC/tc) |
|---|---|---|---|
| | USE: | | In Vivo and Ex Vivo |
| | PURPOSE: | | |
| A. | In vivo Preventative or Therapeutic Vaccine (Established Tumor) | | |
| | Accomplish by transfecting or co-transfecting with nucleic acid encoding superantigen plus | | |
| | one or more of the following: | | |
| | 1. | Superantigens (SAgs) | |
| | 2. | Enzyme that modifies carbohydrate to induce Gal or GalCer epitope expression | |
| | 3. | Functional hyaluronidase from microbial or human sources | |
| | 4. | Staphylococcal or streptococcal erythrogenic toxin | |
| | 5. | Staphylococcal protein a or a domain thereof | |
| | 6. | Staphylococcal hemolysin and functional microbial toxins | |
| | 7. | Functional microbial or human coagulase | |
| | 8. | Costimulatory protein | |
| | 9. | Chemoattractants | |
| | 10. | Chemokines | |
| | 11. | Nucleic acids encoding biosynthesis of lipopolysaccharides | |
| | 12. | Nucleic acids encoding biosynthesis of glycosylceramides | |
| | 13. | Nucleic acids encoding biosynthesis of microbial membrane or capsular lipoproteins and | |
| | | polysaccharides | |
| | 14. | Oncogenes, amplified oncogenes and transcription factors | |
| | 15. | Angiogenic factors and receptors | |
| | 16. | Tumor growth factor receptors | |
| | 17. | Tumor suppressor receptors | |
| | 18. | Cell cycle proteins | |
| | 19. | Heat-shock proteins, ATPases and G proteins | |
| | 20. | Proteins engaged in antigen processing, sorting and intracellular trafficking | |
| | 21. | Inducible nitric oxide synthase (iNOS) | |
| | 22. | apolipoproteins (e.g., Lp(a)) transfected into tumor cells & sickled erythrocytes used for | |
| | | targeting tumor microvasculature | |
| | 23. | LDL and oxyLDL receptors (e.g., SCEP receptor) transfected into tumor cells and sickled | |
| | | erythrocytes & used for targeting to tumor microvasculature | |
| B. | Ex Vivo Immunization of T, y/δT or NKT cells to Produce Tumor Specific Effector Cells (for | | |
| | Adoptive Immunotherapy)* | | |
| | Accomplish by (i) transfecting or co-transfecting tumor or accessory cells with nucleic acid | | |
| | encoding the following, or (ii) providing immobilized molecules or receptors that present the | | |
| | following: | | |
| | 1. | Superantigen | |
| | 2. | SAg receptor and transcription factor with bound SAg | |
| | 3. | CD1 receptor binding and/or expressing SAg-glycosyl ceramide complex | |
| | 4. | CD14 receptor binding or expressing SAg-lipopolysaccharide or SAg-peptidoglycan complex | |
| | 5. | Mannose receptor binding glycosylated SAg | |
| | 6. | Glycophorin receptor | |
| | 7. | SAg-tumor peptide(s) complex on MHC or CD1-bearing APC in soluble or immobilized form | |
| C. | Therapeutic Molecules or Complex Applied to Transfected or Untransfected Tumor cells or | | |
| | Accessory Cells; or MHC class I, class II, CD1, SAg receptor or CD14 receptor: | | |
| | 1. | SAg (wherein cell may express Gal) | |
| | 2. | Glycosylated SAg | |
| | 3. | SAg complex with | |
| | | a. | glycosyl ceramide |
| | | b. | lipopolysaccharide |
| | | c. | peptidoglycan |
| | | d. | mannan proteoglycan |
| | | e. | muramic acid |
| | | f. | tumor peptide |
| | | g. | glycosylceramides with terminal Gal(□1-4)Gal e.g. globotriosylceramide and |
| | | | galabiosylceramide |
| | | h. | Conjugates of SAg-(Gb2 or Gb3 or Gb4) |
| | | i. | Conjugates of SAg-(Gb2 or Gb3 or Gb4)-CD1 |
| | | j. | GPI anchored conjugates: SAg-GPI-(Gb2 or Gb3 or Gb4) |
| | | l. | GPI anchored conjugates: SAg-GPI-(Gb2 or Gb3 or Gb4)-CD1 |
| | | m. | Conjugates of SAg polypeptide or nucleic acid with Verotoxin |
| | | n. | Conjugates of SAg polypeptide or nucleic acid with Verotoxin A or B subunit |
| | | o. | Conjugates of SAg polypeptide or nucleic acid with IFNα receptor peptides |
| | | | homologous to verotoxin |
| | | p. | Conjugates of SAg polypeptide or nucleic acid with CD19 peptides homologous to |
| | | | verotoxin |
| | | q. | Conjugates of SAg polypeptide or nucleic acid with Arg-Gly-Asp or Asn-Gly-Arg |
| | | r. | Conjugates of SAg polypeptide or nucleic acid with LDL, VLDL, HDL |
| | | s. | Conjugates of SAg polypeptide or nucleic acid with Apolipoproteins (e.g., Lp(a), |
| | | | apoB-100, apoB-48, apoE) |
| | | t. | Conjugates of SAg polypeptide or nucleic acid with oxyLDL, oxyLDL mimics, (e.g., |
| | | | 7β-hydroperoxycholesterol, 7γ-hydroxycholesterol, 7-ketocholesterol, 5α-6α- |
| | | | epoxycholesterol, 7β-hydroperoxy-choles-5-en-3β-ol, 4-hydroxynonenal (4-HNE), 9- |
| | | | HODE, 13-HODE and cholesterol-9-HODE) |
| | | u. | Conjugates of SAg polypeptide or nucleic acid with oxyLDL byproducts (e.g. |
| | | | lysolecithin, lysophosphatidylcholine, malondialdehyde, 4-hydroxynonenal) |
| | | v. | LDL and oxyLDL receptors (e.g., LDL oxyLDL, acetyl-LDL, LDL, LRP, CD36, SREC, |
| | | | LOX-1, macrophage scavenger receptors) as polypeptide or nucleic acid alone or |
| | | | with SAg polypeptide or nucleic acid intratumorally |
| | | w. | phytosphingosine, -GPI-phytosphingosine |
| | | x | tumor associated lipid antigens, glycolipid, proteolipid, glycosphingolipid, |
| | | | sphingolipid with inositol phosphate -containing head groups, phytoglycolipids, |
| | | | mycoglycolipids. GPI-sphingosines or lipids |
| | | y. | sphingolipids with inositol phosphate-containing head groups having the general |
| | | | structure: ceramide-P-myoinositol-X where X is a polar substituent such as |
| | | | ceramide-p-inositol-mannose, inositol-1-P-(6)mannose(a1,2-inositol-1P-(1) |
| | | | ceramide, (inositol-P)₂-ceramide, inositol-P-inositol-P-ceramide, inositol-P-inositol-P- |
| | | | ceramide. |
| | | z. | tumor associated glycan antigens - peptidoglycans or glycan phosphotidylinositol |
| | | | (GPI) structures. |
| | | aa | chemokine receptors polypeptide or nucleic acid |

| II. | CELLS: | Specialized Tumor Specific Effector Cells (T, y/δT, NK or NKT cells) |
|---|---|---|
| | USE: | Adoptive Immunotherapy In vivo |
| | PURPOSE: | |
| A. | CD44 Expression on T cells or NKT -- accomplished by: (i) SAg stimulation; and/or (ii) | |
| | transfection with nucleic acid encoding CD44 and/or (iii) transfection with nucleic acid | |
| | encoding glycosyltransferase | |
| B. | Chimeric TCR with Invariant a chain site for binding GalCer and Vβ chain site for binding | |
| | SAg | |
| C. | Dual TCR Vβ chains with sites for SAg binding | |
| D. | T cells or NKT cells with overexpressed Vβ region specific for a given SAg | |
| E. | T cells or NKT cells with lowered signal transduction threshold | |
| III. | MOLECULES: | SAg mimics |
| | USE: | In Vivo Administration |

| | |
|---|---|
| A. | SAg receptor-binding oligonucleotides |
| B. | SAg oligonucleotide-peptide conjugate; oligonucleotide is ‘specific” for SAg receptor on |
| | tumor cells Peptide has deleted class II binding site and intact TCR binding site |
| C. | Phage displayed integrin ligand on tumor neovasculature - carrier for SAg-encoding nucleic |
| | acid. |
| IV. | CARRIERS for nucleic acid encoding SAg |
| | USE Transfection of Tumors In vivo |
| A. | Sickled erythrocytes that target tumor neovasculature |
| B. | Phage displayed tumor neovascular integrin and SAg receptor carrying SAg nucleic acids |
| V. | CARRIERS constructed to co-express SAg conjugates or complexes with |
| | glycosylceramide, αGal, lipopolysaccharides, peptidoglycans |
| | USE Transfection of Tumor Cells and/or DCs and/or DC/tc's - in vivo or ex vivo. |
| A. | Liposomes |
| B. | Proteosomes |

[0054] A single transfecting nucleic acid molecule, or a separate nucleic acid molecule, can also encode another polypeptide such as an adhesion molecule, glycosyltransferase, glycosidase, CD44, cytokine, tumor associated antigen, costimulatory molecule, and the like. In addition, cells transfected in vitro or ex vivo with any of these nucleic acids as well as T cells activated by these transfected cells are administered directly to a cancer-bearing host. Cells transfected in vitro or ex vivo as well as cells activated ex vivo may additionally express a tumor associated antigen expected to be present on host cancer cells.

[0055] Further, cells transfected with nucleic acid that encodes a SAg polypeptide is also be used as a vaccine to immunize a host against a cancer previously present in the host or a cancer that is likely to develop in the host. For example, a host can be vaccinated against a particular cancer by administering tumor cells transfected with nucleic acid encoding a SAg. Alternatively, a SAg transfected cell is used to activate a host T cell population in vitro. This activated T cell population is then administered to a host as a cancer treatment (immunotherapeutic agent). Once activated ex vivo or in vivo, these T cells are expanded with cytokine treatment such as IL-2 treatment.

[0056] Cells to be “transfected” include accessory cells, immunocytes, fibroblasts, or tumor cells. Accessory cells may include, without limitation, endothelial cells, DCs, monocytes, macrophages as well as B and T lymphocytes which can play an “accessory” as well as direct-effector role in an immune response. When transfected in vitro, the cells can be xenogeneic, allogeneic to the host to provide, among other things, additional immunogenicity. Preferably, the transfected cells that are administered to a host, preferably a human, are syngeneic or autologous (or autochthonous).

[0057] Cells transfected with nucleic acid encoding a SAg may also express a tumor associated antigen that is potentially present on host cancer cells. For example, nucleic acid encoding a known tumor antigen are transfected into the SAg-containing cell, or a tumor cell that endogenously contains many different tumor antigens are transfected with SAg-encoding nucleic acid. In the latter case, additional nucleic acids encoding other polypeptides are transfected into the tumor cell. For example, nucleic acid encoding a carbohydrate modifying enzyme such as α1,3-galactosyltransferase, adhesion molecule, costimulatory molecule such as B7-1 and B7-2, MHC class I molecule and/or MHC class II molecule are cotransfected into tumor cells together with nucleic acid encoding a SAg.

[0058] SAg-encoding nucleic acid can encode a mutant, variant, and/or modified form of a SAg. These forms can be used to transfect T cells, alone or in combination with wild-type SAg-encoding acid. In addition, tumor cells are provided with the capacity to colonize sites of metastases and the ability to locally hydrolyze surrounding tumor ground substance and neovasculature by transfection of key bacterial Staphylococcal and Streptococcal enzymes, toxins and capsular polysaccharides which confer upon the tumor cell additional tumor killing properties and immunogenicity. The transfected genes include staphylococcal hyaluronidase (tissue spreading factor), Staphylococcal erythrogenic toxin and Streptococcal capsular polysaccharide. The tumor cell may thus be capable of mimicking the tissue invasive and destructive properties of the Streptococcus and Staphylococcus as they produce a sterile cellulitis localized to tumor sites.

[0059] These methods are used to treat any solid tumor such as carcinoma, melanoma, and sarcoma, or cancers of hematopoietic origin such as leukemia and lymphomas. This invention also provides for T cells or NKT cells including γ/δT cells which after activation by SAgs in native or mutant form or transfected into tumor cells express surface phenotypes which enhance their ability to traffic efficiently to tumor sites in vivo. Such phenotypes include CD44 and/or selective Vβ expression. In response to these SAg stimulants, the T cells produce TH1 cytokines and, in particular, IFN-γ and IL-2.

[0060] Further, provided are methods of overcoming the T cell unresponsiveness of cancer patients by transfection of T cells from tumor bearing host with the nucleic acids encoding the SAg receptor thus enabling these cells to be reactivated by exogenous SAg and used for adoptive immunotherapy in the same cancer patient.

[0061] Provided herein are SAg oligonucleotide and oligonucleotide-peptide compositions capable of targeting and delivering SAgs to tumor sites in vivo without elimination by circulating naturally occurring SAg specific antibodies prevalent in the human cancer patients. Provided also are compositions and methods for delivery of therapeutic nucleic acid constructs to tumor sites in vivo using therapeutic genes carried by erythrocytes from patients with sickle cell anemia which have the unique capability of adhering to sites on tumor neovasculature.

### 1. Cancer

[0062] This invention is used to treat any type of cancer in a host at any stage of the disease. More particularly, the cancer is a solid tumor such as a carcinoma, melanoma, or sarcoma. This invention is used to treat cancers of hemopoietic origin such as leukemia or lymphoma, that involve solid tumors. A host is any animal that develops cancer and has an immune system such as mammals. Thus, humans are considered hosts within the scope of the invention. Since the invention provides SAg-transfected cells as a vaccine, a cancer is one that a host is likely to develop based on family history or other criteria. In this case, the host is one that is susceptible to cancer.

### 2. Nucleic Acid

[0063] The term nucleic acid as used herein encompasses both RNA and DNA, including cDNA, genomic DNA, and synthetic (e.g., chemically synthesized) DNA. The nucleic acid can be double-stranded or single-stranded. Where single-stranded, the nucleic acid can be the sense strand or the antisense strand. The term isolated nucleic acid means that the nucleic acid is not immediately contiguous with both of the sequences with which it is immediately contiguous (one on the 5′ end and one on the 3′ end) in the naturally occurring genome of the organism from which it is derived. For example, an isolated nucleic acid molecule can be, without limitation, a recombinant DNA molecule of any length, provided nucleic acid sequences normally found immediately flanking that recombinant DNA molecule in a naturally occurring genome are removed or absent. Thus, an isolated nucleic acid molecule includes, without limitation, a recombinant DNA that exists as a separate molecule (e.g., a cDNA or a genomic DNA fragment produced by PCR or restriction endonuclease treatment) independent of other sequences as well as recombinant DNA that is incorporated into a vector, an autonomously replicating plasmid, a virus (e.g., a retrovirus, adenovirus, or herpes virus), or into the genomic DNA of a prokaryote or eukaryote. In addition, an isolated nucleic acid can include a recombinant DNA molecule that is part of a hybrid or fusion nucleic acid sequence.

[0064] Typically, regulatory elements are nucleic acid sequences that regulate the expression of other nucleic acid sequences at the level of transcription and/or translation. Thus, regulatory elements include, without limitation, promoters, operators, enhancers, ribosome binding sites, transcription termination sequences (i.e., a polyadenylation signal), and the like. In addition, regulatory elements can be, without limitation, synthetic DNA, genomic DNA, intron DNA, exon DNA, and naturally-occurring DNA as well as non-naturally-occurring DNA. It is noted that isolated nucleic acid molecules containing a regulatory element are not required to be DNA even though regulatory elements are typically DNA sequences. For example, nucleic acid molecules other than DNA, such as RNA or RNA/DNA hybrids, that produce or contain a DNA regulatory element are considered regulatory elements. Thus, recombinant retroviruses having an RNA sequence that produces a regulatory element upon synthesis into DNA by reverse transcriptase are isolated nucleic acid molecules containing a regulatory element even though the recombinant retrovirus does not contain any DNA.

### 3. Transfection

[0065] The term “transfection,” of a nucleic acid into a cell, as used herein is intended to include “transformation,” “transduction,” “gene transfer” and the like, as they are commonly used in the art. “Transfection ”is not intended to be limited to transfer of nucleic acid into a cell by means of an infectious particle such as a retrovirus, as the term may have been used originally. Rather any form of delivery and introduction of a nucleic acid molecule, preferably DNA, into a cell, whether in the form of a plasmid, a virus, a liposome-based vector, or any other vector, so that the nucleic acid is expressed in the cell and its protein product(s) made, is included within the definition of “transfection.”

[0066] When a nucleic acid is said to “encode” a product other than a protein, this language is intended to mean that it encodes the necessary proteins/enzymes that are involved in, or required for, the synthesis of that product. For example, if a DNA molecule is said to encode LPS, it clearly encodes one or more proteins (enzymes) that are involved in the biosynthesis of LPS. If a nucleic acid is said to “encode the biosynthesis” of a structure, it means that the nucleic acid encodes the enzymes that participate in the creation of that structure. In particular for the carbohydrate structures referred to herein, the nucleic acids used in the invention are introduced into a cell that normally does not make, or makes little of, the carbohydrate structure so as to provide to that cell the genetic material for an enzyme or enzymes that generate the carbohydrate structure or modify a different carbohydrate structure to that one indicated. As a further example, DNA encoding a tumor antigen may directly encode a protein/peptide tumor antigen, or alternatively, may encode proteins or peptides that either contribute structurally to, or catalyze the synthesis of, a tumor antigen which is partly protein (e.g., lipoprotein or proteoglycan) or totally non-protein (e.g., a glycolipid).

[0067] The invention provides methods of treating cancer in a host by transfecting cells with SAg-encoding nucleic acid. Suitable host or non-host cells for transfection include, without limitation, endothelial cells, DCs, monocytes, macrophages, B cells, T cells, immunocytes, muscle cells, fibroblasts, NK cells, NKT cells (TCR αβ⁺ CD4^{neg} and CD8^{neg}), γ/δ T cells and tumor cells. The terms accessory cell and antigen presenting cell (APC) can be used interchangeably and include cells having the ability to process and present antigens to T cells as well as to provide both defined and less well defined growth and differentiation factors (costimulatory signals) during an ongoing immune response.

[0068] Cells are transfected in vivo or in vitro. When transfected in vivo, the cells are of host origin. When transfected in vitro, the cells are autologous, allogeneic, or xenogeneic to the host to provide additional immunogenicity. In addition to being transfected with nucleic acid encoding a SAg, the cells are transfected with nucleic acid encoding any other polypeptide including, without limitation, a galactosyltransferase, staphylococcal hyaluronidase and/or erythrogenic toxin, streptococcal capsular polysaccharide, CD44, tumor antigen, costimulatory molecule such as B7-1 and B7-2, adhesion molecules, MHC class I molecule and/or MIIC class II molecule. Nucleic acids encoding the molecules are cotransfected with the SAgs. But for others, including but not limited to Staphylococcal hyaluronidase, erythrogenic toxin, Streptococcal capsular polysaccharide and CD44 genes, the nucleic acids encoding the SAgs are fused to other nucleic acids resulting in expression of a fusion protein.

[0069] Methods for in vivo and in vitro transfection of cells are well known. For example, two books in the series Methods in Molecular Medicine published by Humana Press, Totowa, N.J., describe in vivo and in vitro transfection protocols that are adaptable to the present invention (Vaccine Protocols edited by Robinson et al., (1996) in Gene Therapy Protocols edited by Robbins et al., Humana Press, Totowa, N.J. (1997)). Transfection protocols are also discussed elsewhere ((Sambrook, J. et al., Molecular Cloning, Second Edition, Cold Springs Harbor Laboratory Press, Plainview, N.Y., (1989)). In addition, use of various vectors to target epithelial cells, use of liposomal constructs, methods of transferring nucleic acid directly into T cells, hematopoietic stem cells, and fibroblasts, methods of particle-mediated nucleic acid transfer to skin cells, and methods of liposome-mediated nucleic acid transfer to tumor cells have been described elsewhere. (Feigner, PL et al., Cationic Lipids for Intracellular Delivery of Biologically Active Molecules, U.S. Pat. No. 5,459,127, issued Oct. 17, 1995; Feigner, PL, Cationic Lipids for Intracellular Delivery of Biologically Active Molecules, U.S. Pat. No. 5,264,618, issued Nov. 23, 1993; Felgner, PL, Exogenous DNA Sequences in a Mammal, U.S. Pat. No. 5,580,859 issued Dec. 3, 1996; Felgner, PL, A Protective Immune Response in a Mammal by Injecting a DNA Sequence, U.S. Pat. No. 5,589466 issued Dec. 31, 1996).

[0070] Further, use of ligand-based nucleic acid carriers to effect transfection of mammalian cells in vivo has been described elsewhere (Wu et al., J. Biol. Chem., 262:4429-4432 (1987); Wu et al., J. Biol. Chem., 263:14621-14624 (1988); Wu et al., J. Biol. Chem., 264:16 985-16987 (1989); Wu et al., J. Biol. Chem., 266:14338-14342 (1991); and Garrigues J et al., Am. J. Path. 142:607-622 (1993)). Briefly, plasmid DNA is conjugated to a desialylated branched carbohydrates such as orosomucoid by carbodiimide crosslinking to polylysine and targeted to asialoprotein receptors expressed on cells in the liver. In addition, enhanced nucleic acid delivery and expression can be achieved using a ligand-polylysine conjugate coupled to carbohydrate moieties on viruses that is then combined with DNA. These preparations are suitable for parenteral injection and are readily taken up by cells expressing asialoprotein receptors in the liver after which the DNA is internalized and integrated into the host genome. In addition, nucleic acid can be administered intravenously, intramuscularly, or subcutaneously to induce a response in a host.

[0071] Thus, targeting nucleic acid to the surface of particular cells is accomplished by conjugating nucleic acid to molecules that bind to a cell surface structure such as a receptor. Examples of cell surface structures that can be targeted include, without limitation, the transferrin receptor, and asialoglycoprotein receptor. The molecules that bind cell surface structures and are conjugated to nucleic acid for targeting can be, without limitation, natural ligands for the surface structure, synthetic compositions that exhibit specific binding, and antibodies directed against the surface structure. For example, a monoclonal antibody specific for a cell surface epitope such as the BR96 antibody that recognizes Le^{x} carbohydrate epitope abundantly expressed by colon, breast, ovary, and lung carcinomas can be used. Other monoclonal antibodies can include, without limitation, those that recognize growth factor receptors, transferrin receptors, IL-2 receptors, epidermal growth factor receptors, the hev oncogene, and TAPA-1 as well as any other antibody having specificity for a surface structure that can be internalized.

[0072] Liposomes containing nucleic acid are also targeted to specific cell types such that the nucleic acid is expressed. For example, nucleic acid is loaded into or attached to cationic DOTMA: doleoylphosphatidylethanolamine (DOPE) liposomes that contain exposed molecules that bind to a cell surface structure such as tumor cells or tumor microvasculature (Example 5). The molecules that bind cell surface structures and are attached to liposomes can be, without limitation, natural ligands for the surface structure, synthetic compositions that exhibit specific binding, and antibodies directed against the surface structure. Maximal transfer of nucleic acids encoding SAgs is attained by synthesizing the liposomes with an appropriate ratio of nucleic acid to lipid. In addition, these nucleic acid-containing liposomes are administered intravenously, intramuscularly, or subcutaneously to induce a response in a host.

[0073] Naked nucleic acid is also administered to a host. For example, naked pharmaceutical-grade plasmid DNA are injected into a host intramuscularly such that it is expressed by host cells (U.S. Pat. Nos.5,589,466; 5,580,599; 5,264,618; 5,459,127; and 5,561,064). In addition, cationic lipids are used to deliver biologically active molecules, such as oligonucleotides to host cells in vivo (U.S. Pat. Nos. 5,264,618, 5,459,127, and 5,561,064). Thus, nucleic acid encoding a SAg is administered to a host in naked or cationic lipid form such that the SAg is expressed. It is noted that any nucleic acid described herein can be administered in vivo as naked DNA. Further, other methods of administering naked DNA to a host can be used such as those related to the direct injection of naked DNA for use in vaccines (Cohen et al., Science 259:1691-1692 (1993); Corr et al., J. Exp. Med. 184:1555-1560 (1996); Varmus et al., Proc. Natl. Acad. Sci. USA 81:5849-5852 (1984); and Benveniste et al., Proc. Natl. Acad. Sci. USA 83:9551-9555 (1986)).

[0074] Our previous patent applications which are hereby incorporated by reference include U.S. patent application Ser. No. 07/416,530, filed Oct. 3, 1989, U.S. patent application Ser. No. 07/466,577, filed Jan. 17, 1990, U.S. patent application Ser. 07,891,718, filed Jun. 1, 1992, U.S. patent application Ser. 08/025,144, filed Mar. 2, 1993, U.S. patent application Ser. 08/189,424, filed Jan. 31, 1994, U.S. patent application Ser. 08/491,746, filed Jun. 19, 1995, PCT applications PCT/US91/00342, and PCT/US94/02339. These applications have given comprehensive description of the SAg genes, the creation of high enterotoxin producing mutant strains as well as recombinant methods of production of SAgs. In addition, methods of treating cancer by transfecting tumor cells in vivo and in vitro with SAg nucleotides using well defined recombinant technology have been described in these applications. Subsequently, Dow et al., (J. Clin. Invest. 99: 2616-2624 (1997)) described in vitro and in vivo transfection of eukaryotic cells with SAg DNA which was capable of inducing inflammatory responses in vivo. It is noted that the SAg genes have been cloned and their sequences delineated before 1988 and methods used to transfect cells in vivo or in vitro with nucleic acids encoding polypeptides are also well known in the art.

### 4. Constructs

[0075] Tumor cells are transfected with various nucleic acids which are designed to increase their immunogenicity and to provide them with capacity to traffic to metastatic sites where they may initiate a potent inflammatory and immune response. Such constructs of this invention can be linear or circular nucleic acids obtained from mammals or bacteria that encode a polypeptide such as a SAg, mutant SAg, erythrogenic toxin, enzymes involved in the biosynthesis of glycosyltransferases, bacterial glycosylceramides, LPS's, lipoproteins, capsular or membrane polysaccharides, microbial toxins and enzymes such as hyaluronidase, collagenase, elastase, coagulase, protease, kinase, lipase. Constructs may also contain tumor associated antigens, costimulatory molecules such as B7-1 and B7-2, adhesion molecules, receptor molecules such as SAg receptors, CD1, CD14, MHC class I molecules and/or MHC class II receptors. Such constructs may also contain amplified nucleic acids associated with tumors such as oncogenes, transcription factors, angiogenesis factors and receptors, tumor growth factor receptors, chimeric receptors. The latter nucleic acids may be linked to SAg-encoding nucleic acid to produce heightened expression of the SAg. The amplified nucleic acids may include tumor tissue specific promoters and nucleic acids that direct the colonization or metastasis of tumors to selected sites in vivo.

[0076] Constructs can also contain elements that regulate and/or promote the expression of an encoded polypeptide. For example, a construct containing nucleic acid that encodes enterotoxin B (SEB) can have a strong promoter element upstream of the SEB encoding sequence. In addition, constructs can contain nucleic acid that anchors an encoded polypeptide to the cell surface after expression. For example, a construct containing nucleic acid that encodes SEB can contain a membrane-anchoring sequence such as nucleic acid that encodes a hydrophobic stretch of amino acids or a glycosylphosphatidylinositol (GPI)-anchoring motif. Thus, the SAg, or other polypeptides as well, can be anchored in the plasma membrane by coupling to membrane lipids or glycolipids. These anchors can be attached to the C terminus of the polypeptide in the endoplasmic reticulum. Alternatively, a SAg known to be associated with the cell surface after expression can be used such as the mammary tumor viral (MMTV) SAg that is GPI-linked.

[0077] In one embodiment, SAgs as well as SAg receptors are engineered to remain anchored to the surface of transfected cells when the cell is to be used for immunization. Likewise, when a SAg receptor gene is transfected into anergized T cells from cancer patients, it is desirable to express the receptor on the cell surface so that they are readily recognized and activated by exogenous receptor bound SAg. In contrast, when it is desirable to use SAg transfected cells to activate T cells in vivo or ex vivo or to promote trafficking of transfected tumor cells to metastatic sites in vivo, it is suitable for the SAg to be secreted from the transfected cells.

[0078] In additional embodiments, potent tumor specific effector T or NKT cell clones are produced with overexpressed Vβ regions of their TCRs making them highly receptive to activation by exogenous SAg. Likewise CD44 genes are transfected into T cells or NKT cells making them more susceptible to expression of this epitope after SAg stimulation.

[0079] Constructs also contain a selectable marker or reporter such that transfected cells can be isolated. For example, a construct containing nucleic acid that encodes a SAg can also contain nucleic acid that encodes a polypeptide that confers resistance to a selection agent such as neomycin (also called G418), puromycin, or kanamycin.

[0080] Nucleic acid and nucleic acid constructs of the present invention are incorporated into a vector, an autonomously replicating plasmid, or a virus (e.g., a retrovirus, adenovirus, or herpes virus). Typically, these vectors, plasmids, and viruses can replicate and function independently of the cell genome or integrate into the genome. Vector, plasmid, and virus design depends on, for example, the intended use as well as the type of cell transfected. Appropriate design of a vector, plasmid, or virus for a particular use and cell type is within the level of skill in the art. In addition, a single vector, plasmid, or virus can be used to express either a single polypeptide or multiple polypeptides. It follows that a vector, plasmid, or virus that is intended to express multiple polypeptides will contain one or more operably linked regulatory elements capable of effecting and/or enhancing the expression of each encoded polypeptide.

[0081] The term “operably linked” means that two nucleic acid sequences are in a functional relationship with one another. For example, a promoter (or enhancer) is operably linked to a coding sequence if it effects (or enhances) the transcription of the coding sequence. A ribosome binding site is operably linked to a coding sequence if it is positioned to facilitate translation. Operably linked nucleic acid sequences are often contiguous, but this is not a requirement. For example, enhancers need not be contiguous with a coding sequence to enhance transcription of the coding sequence.

[0082] A vector, plasmid, or virus that directs the expression of a polypeptide such as a SAg can include other nucleic acid sequences such as, for example, nucleic acid sequences that encode a signal sequence or an amplifiable gene. Signal sequences are well known in the art and can be selected and operatively linked to a polypeptide encoding sequence such that the signal sequence directs the secretion of the polypeptide from a cell. An amplifiable gene (e.g., the dihydrofolate reductase [DHFR] gene) in an expression vector can allow for selection of host cells containing multiple copies of the transfected nucleic acid.

[0083] Standard molecular biology techniques are used to construct, propagate, and express the nucleic acid, nucleic acid constructs, vectors, plasmids, and viruses of the invention ((Sambrook, J. et al., supra; Maniatis et al., Molecular Cloning (1988); and U.S. Pat. No. 5,364,934. For example, prokaryotic cells (e.g., E. coli, Bacillus, Pseudomonas, and other bacteria), yeast, fungal cells, insect cells, plant cells, phage, and higher eukaryotic cells such as Chinese hamster ovary cells, COS cells, and other mammalian cells can be used.

[0084] Constructs are used in vivo or ex vivo or in combination as in Example 5-7, 16-23. They are used to immunize a host by direct in vivo administration or they are used ex vivo to activate T cells or NKT cells to become tumor specific effector cells which are employed for adoptive immunotherapy of cancer by methods and models (Examples 7, 16, 19-23).

[0085] To test the anti-tumor-inducing ability of a particular construct as well as the transfected cell itself, the following general assay is performed. B16 melanoma, A20 lymphoma, host tumor cells, or any other tumor cell lines appropriate to the host (i.e., having tumor antigens expected to be present on the host tumor cells) are transfected with a given construct. Appropriate numbers of transfected cells (e.g., 10⁵-10⁷ cells) are then implanted subcutaneously into animals such as mice, rats, rabbits, or the like and 1-6 months later untransfected tumor cells are implanted. Tumor outgrowth from the untransfected tumor cells is measured and compared to control animals not given the transfected tumor cells. If tumor outgrowth is reduced or prevented, then the transfected cells are effective anti-tumor agents useful as tumor vaccines. Alternatively, 10⁵-10⁷ transfected tumor cells can be given 3-10 days after the appearance of established tumors from untransfected tumor cells. If tumor outgrowth is reduced or arrested, then the transfected cells are effective anti-tumor agents useful in treating established tumors.

[0086] To test the anti-tumor effect of SAg activated T cells, γ/δ T cells NKT cells or T cells clones overexpressing Vβ or CD44, the following general protocol is used. Lymph node cells from C57/B1 mice bearing MCA 205 or 207 sarcomas which were implanted in the adjacent inguinal region three to ten days before are extracted and placed in tissue culture. The cells are incubated with various enterotoxins for two days and then with IL-2 for an additional two to three days. The cells are then harvested and injected into syngeneic mice with established pulmonary metastases (six to twelve days after tumor injection). Three weeks later the animals are evaluated for pulmonary metastases compared to controls which receive no cells or cells that were stimulated without enterotoxins. The adoptively transferred cells may be enriched for NKT cells or γ/δ T cells or α/β+ T cells alone which are selectively injected into tumor bearing hosts. Likewise, they are selected for predominant expression of the CD44 phenotype during the SAg activation phase at which time the CD44 enriched population is harvested and used for adoptive immunotherapy. The dose of injected T cells, NKT cells or γ/δ T cells and/or CD44 enriched cells (which are produced by any of these T cell, NKT cell or γ/δ T cell populations) range from 10⁶ to ⁷ and are be given on a schedule of once weekly for one to four weeks.

### 5. Superantigens (SAgs)

[0087] SAgs are polypeptides that have the ability to stimulate large subsets of T cells. SAgs include Staphylococcal enterotoxins, Streptococcal pyrogenic exotoxins, Mycoplasma antigens, rabies antigens, mycobacteria antigens, EB viral antigens, minor lymphocyte stimulating antigen, mammary tumor virus antigen, heat shock proteins, stress peptides, clostridial and toxoplasmosis antigens and the like. Any SAg can be used as described herein, although, Staphylococcal enterotoxins such as SEA, SEB, SEC, and SED and streptococcal pyrogenic exotoxins such as toxic shock-associated toxin (TSST-1 also called SEF) are preferred.

[0088] When using enterotoxins, the region related to emetic activity can be omitted to minimize toxicity. In addition, SAgs can be derivatized to minimize toxicity. The level of toxicity may not be a concern when using SAg transfected cells to activate lymphocytes ex vivo since the lymphocytes can be rinsed of SAg polypeptide prior to administration to a host.

[0089] The nucleic acid sequences that encode SAgs are known and readily available. For example, Staphylococcal enterotoxin A (SEA), SEB, SEC, SED, SEE, TSST-1, and Streptococcal pyrogenic exotoxin (SPEA) have been cloned and can be expressed in E. coli (Betley M J and J J Mekalonos, J. Bacteriol. 170:34 (1987); Huang I Y et al., J. Biol. Chem., 262:7006 (1987); Betley M et al., Proc. Natl. Acad. Sci. USA, 81:5179 (1984); Gaskill M E and S A Khan, J. Biol. Chem., 263:6276 (1988); Jones C L and S A Khan, J. Bacteriol., 166:29 (1986); Huang I Y and M S Bergdoll, J. Biol. Chem., 245:3518 (1970); Ranelli D M et al., Proc. Nat. Acad. Sci. USA 82:5850 (1985); Bohach G A, Infect Immun., 55:428 (1987); Bohach G A, Mol. Gen. Genet. 209:15 (1987); Couch J L et al., J. Bacteriol. 170:2954 (1988); Kreiswierth B N et al., Nature, 305:709 (1983); Cooney J et al., J. Gen. Microbiol., 134:2179 (1988); Iandolo J J, Annu. Rev. Microbiol., 43:375 (1989); and U.S. Pat. No. 5,705,151)). Additional nucleic acid sequences encoding SAgs are described elsewhere (Bohach et al., Crit. Rev. in Microbiology 17:251-272 (1990); (Kotzin, B L et al., Adv Immunol 54: 99-165 (1993))

[0090] PCR can be used to isolate SAg-encoding acid. For example, the nucleic acid encoding SEA, SEB, and TSST-1 can be isolated as described elsewhere (Dow et al., J. Clin. Invest. 99:2616-2624 (1997)). Briefly, the following primers can be used to amplify the SAg-encoding nucleic acid:

[0091] SEA forward: GGGAATTCCATGGAGAGTCAACCAG,

[0092] SEA backward: GCAAGCTTAACTTGTTAATAG;

[0093] SEB forward: GGGAATTCCATGG-AGAAAAGCG,

[0094] SEB backward: GCGGATCCTCACTTTTTCTTTG; and

[0095] TSST-1 forward: GGGGTACCCCGAAGGAGGAAAAAAAAATGTCTACAAACGATAATATAAAG,

[0096] TSST-1 backward: TGCTCTAGAGCATTAATTAATTTCTGCTTCTATAGTTTTTAT.

[0097] The full-length TSST-1 nucleic acid sequence is cloned into a eukaryotic expression vector (pCR3; In Vitrogen Corp., San Diego, Calif.), whereas only the sequence corresponding to the mature SEB and SEA (sequences minus the putative bacterial signal sequences) is cloned into pCR3. Removal of the SEB and SEA signal sequences increases the level of expression in transfected cells. The plasmids are grown in Escherichia coli and plasmid DNA extracted by the modified alkaline lysis method and purified on a CsC1 gradient.

[0098] Nucleic acids encoding mutant or variant SAgs are also considered nucleic acid sequences encoding SAgs within the scope of the invention. For example, a mutant SAg-encoding acid sequence is engineered such that the resulting SAg is devoid of amino acid residues, e.g., histidine, known to produce toxicity. Likewise, SAg-encoding nucleic acid is engineered to contain or lack sequences that facilitate the selective binding of SAgs to certain Vβ regions of the TCR present on T cells or to ganglioside, mannose (or other carbohydrate) receptor, certain regions of MHC class II, and/or enterotoxin receptors present on tumor cells, antigen presenting cells (APCs), and/or lymphocytes.

[0099] Nucleic acid sequences that encode a SAg are also fused, in frame, with nucleic acid that encodes another polypeptide. This larger nucleic acid is termed herein a SAg fusion gene and the resulting polypeptide product is a SAg fusion product. Nucleic acid sequences that are fused to SAg-encoding nucleic acid include, without limitation, nucleic acid sequences that encode tumor antigens, costimulatory molecules, adhesion molecules and MHC class II molecules. The superantigen fusion product is secreted by a transfected cell, expressed on the cell surface or it may remain intracellular in nucleic acid or partly processed form.

[0100] SAgs are also isolated and purified from their natural source as well as from a heterologous expression system such as E. coli. Likewise, SAg-containing polypeptides (e.g., SAg fusion products) are isolated and purified from a heterologous expression system. In addition, Staphylococcus strains producing high levels of enterotoxin have been identified and are available. For example, exposing enterotoxin-producing Staphylococcus aureus to mutagenic agents such as N-methyl-N-nitro-N-nitrosoguanidine results in a 20 fold increase in enterotoxin production over the amounts produced by the parent wild-type Staphylococcus aureus strain (Freedman M A and Howard M B J. Bacteriol., 106:289(1971)).

### 6. Glycosylated SAgs and SAgs Conjugated to Glycosylceramides, Lipopolysaccharides, Glycans and Lipoarabinomannans: Presentation on CD1 Receptors for Activation of T or NKT Cells and Differentiation to Tumor Specific Effector Cells

[0101] In a tumor cell or accessory cell, nucleic acid signal sequences are integrated into nucleic acids encoding the SAg molecules in order to route them to the Golgi apparatus and endoplasmic reticulum of tumor cells where they are glycosylated via appropriate glycosyltransferases (precedents from the selective transferases used to produce monogalactosylceramide in the Sphingomonas paucimobilis) to produce a proteoglycan with structural similarity to LPS, lipoteichoic acid, GalCer, α-gal, Streptococcus capsular polysaccharide. This construct is then secreted as an immunogenic “ground substance.” Alternatively, the resulting SAg glycolipid is anchored to the membrane, expressed on the cell surface and routed specifically to CD1 receptors.

[0102] SAgs which are glycosylated by the above intracellular processes have improved capacity to bind surface structures such as mannose receptors, ganglioside receptors and CD1 receptors. Generally, the nucleic acids encoding a SAg are modified to include a signal sequence for routing to the Golgi apparatus and a core sequence which initiates glycosylation. It is important that the V Vβ TCR binding region is not blocked by the added carbohydrate modifications. For example, an N-linked glycosylation site (in the sequence Asn X Ser/Thr where X is any residue except Pro) is engineered into SAg-encoding acid sequences which do not functionally interfere with TCR binding and activation. The nucleic acid encoding these signal sequences and core binding glycosylation sites of SAgs are fused to nucleic acids encoding SAg and the fusion gene used to transfect tumor cells of a host. In addition, glycosylated forms of SAgs are expressed in a heterologous eukaryotic expression system such as yeast cells or baculovirus-infected insect cells. In gram negative bacteria (such as E. coli), nucleic acids encoding SAgs are fused to nucleic acids encoding LPS's, in gram positive bacteria (such as Staphylococcus or Streptococcus), to nucleic acids encoding capsular polysaccharides and teichoic acids and in mycobacterial species to nucleic acids encoding lipoarabinan.

[0103] The gram negative bacterium Sphingomonas paucimobilis produces the monogalactosylceramide. In this bacterium, nucleic acids encoding SAgs (containing serine) are fused to nucleic acids encoding and directing the synthesis of glycosylceramides and monogalactosylceramide in particular. The resulting galactosylceramide-SAgs are powerful T cell stimulants. The same procedure is followed in bacteria which naturally produce LPS's such as E. coli, Salmonella or Klebsiella or for bacteria which naturally produce lipoarabinomannans glycans or polysaccharides containing cell walls such as Mycobacterium and Streptococcus respectively. The SAg-polysaccharide constructs bind to CD1 receptors of antigen presenting cells. They are then capable of activating NKT cells either in vivo or ex vivo to become tumor specific effector cells in response to IL-12.

[0104] SAgs are also conjugated genetically or biochemically as in Example 5 to LPS's via a natural high affinity binding site for LPS binding protein (LPB). Once bound, the SAg catalyzes the binding of LPS monomers to CD14 and CD1 receptors in a fashion similar to that of LPB. In this way, the conjugates are capable of activating T cells for use in vivo or ex vivo for adoptive immunotherapy while preserving the anti-apoptotic effect of LPS on SAg activated T cells. Examples of their preparation and use in vivo and in vitro are given in Examples 4, 7, 15, 16, 18-23.

[0105] In addition, SAgs similarly conjugated to lipoarabinomannans and glycans are integrated into lymphomonocytic cell membranes via glycosylphosphatidylinositol anchors. These SAg-lipoarabinomannan complexes are expressed or secreted by antigen presenting cells or tumor cells. They are also bound to CD1, mannose or class II receptors in which form they are used to activate T or NKT cells. These constructs are administered in vivo or they are used ex vivo to produce tumor specific effector cell populations (T cell or NKT cells) which are employed for adoptive immunotherapy of cancer (Examples 5, 15-16, 18-23).

[0106] Mannose receptor expression is upregulated by cytokines. For example, accessory cells including DCs, and tumor cells express mannose receptors on their surfaces after GM-CSF treatment. SAgs are bound to mannose receptors by transfecting cells with nucleic acids encoding SAg which also consist of nucleic acids encoding signal sequences and glycosylation sites which, in the presence of appropriate glycosyltransferases, produce mannosylated SAgs. These preferentially bind to mannose receptors. In addition, glycosylated SAgs bind to amphipathic cell surface gangliosides and glycolipids via hydrophobic interactions. These glycosylated SAgs presented in a form bound to mannose receptors are capable of activating α/β cells, γ/δ T cells, NK cells, and NKT cell populations. They are used either in vivo by direct administration or ex vivo to produce a tumor specific effector cell population (T cell, NK or NKT cells) for use in adoptive immunotherapy of cancer (Examples 4, 5, 15, 16, 18-23).

### 7. SAgs Conjugated to Glycosylceramides Gangliosides and Verotoxins (VT)

[0107] Amphipathic gangliosides bound to tumor cell surfaces such as GD1, GD2, GD3, GM1, GM2, GM3, GQ1 and GT1 are capable of binding exogenous SAgs. The binding of a SAg to the surface of a tumor cell creates an immunogen on the tumor cell surface. Tumor cells transfected with nucleic acids encoding glycosyltransferases overexpress gangliosides, producing a greater surface density of ganglioside moieties available to bind exogenous SAgs. Enterotoxins bind to cell surface amphipathic gangliosides and/or glycophorins via their hydrophobic residues while preserving their T cell binding properties. SAgs are also glycosylated intracellularly by addition of a glycosylation site or by chemical conjugation of a carbohydrate moiety using methods well described in the art. In glycosylated or native form, the SAgs bind to surface ganglioside while retaining their T cell activating properties. Overexpression of the hydrophobic regions of the molecule promotes binding to the surface gangliosides (Example 5).

[0108] Examples from nature of exogenous proteins that bind to cell surface gangliosides include falciparum malarial merozoite which combines with gangliosides associated with the Duffy blood group and induce long standing and durable protection and tetanus toxin which binds to surface gangliosides with highest affinity for the disialyl groups linked to inner galactosyl residues.

[0109] Enterotoxin B contains a T cell activating sequence which is chemically cross-linked or polymerized using bifunctional agents such as carbodiimide, glutaraldehyde or formaldehyde by established methods well known in the art. These polymers are then bound to gangliosides expressed on tumor cells such as GD1, GD2, GQ1,GD3 or GM1, GM2, GM3, GT1. In monomeric or polymerized form, SAgs also bind to monogalactosylceramides which are free or bound to CD1 receptors on tumor cells or antigen presenting cells via hydrophobic interactions. The monogalactosylceramide binds to hydrophobic sequences on the SAg which are expressed at multiple sites on the molecule. In one embodiment, the lauroyl group [CH₃(CH)₁₀CO] or the group [CH₃(CH)₁₃CO] is covalently added to each of the peptide's amino terminus to serve as a of the CD1 receptor. The key SAg peptide sequence such as of SEB (amino acids 225-234) which confers T cell activating properties is tandemly repeated to various lengths prior to lipid conjugation.

[0110] Hydrophobic SAg peptides(such as Trp, Tyr, Phe, Leu, and Ile) are screened for binding to glycosylceramides immobilized on CD1 receptors or via adsorption chromatography with immobilized glycosylceramide. The SAg sequences with the greatest affinity for the CD1 receptor are selected for conjugation to the glycosylceramides and LPS's. Alternatively, the SAg sequence is screened for affinity for the CD1 or MHC class II receptor using a peptide phage display library as described in Examples 4. Likewise, pre-formed SAg-glycosylceramide or LPS complexes are also screened for affinity for the CD1 or MHC class II receptor (Example 4). These lipopeptide complexes are then screened for T cell proliferative activity and IL-12 production. The monomeric or polymerized SAg in native or glycosylated form binds to the monoglycosylceramides or gangliosides expressed on CD1 receptors on the tumor cell surface.

[0111] Therapeutic Construct: SAg-Glycosylceramide Conjugates

[0112] SAgs have an affinity for glycosphingolipids especially those with terminal or subterminal Gal(α1-4)Gal residues. Such residues are expressed on tumor cells as Gal(α1-4)Gal(β1-4)GlcCeramide (globotriaosylceramide or Gb3) and Gal(α1-4)GalCeramide (galabiosylceramide or Gb2). Gb3 and Gb2 also known as CD77, Burkitt's lymphoma antigen, and the human blood group p^{k} antigen are the natural receptors for Shiga toxins and VT's. Shiga toxin, a 69-kDa complex of proteins comprised of five B-subunits (7 kDa each) and one A-subunit (30 kDa) has high affinity for the terminal digalactose of Gb3 or Gb2. Methods for their preparation and isolation are described in Example 41. Once bound to the tumor cell, these toxins are internalized and induce apoptosis.

[0113] The synthetic pathway for neutral glycosphingolipids in eukaryotic cells is known. Glucosylceramide (GlcCer) is the precursor of lactosylceramide (LacCer), which leads, in order, to Gb3 and globotetraosylceramide (Gb4). Different Golgi enzymes are responsible for addition of monosaccharides from nucleotide-sugar donors in each step of the pathway. Globotriaosylceramide synthase (UDP-galactose:lactosylceramide α 1-4-galactosyltransferase) has been purified. In the cytoplasm, the A-subunit of the Shiga toxin or VT is processed by a trypsin-like cleavage. The “activated” 27-kDa A-subunit inactivates 60S ribosomes by depurination of a single nucleotide in 28S rRNA, rendering ribosomes incapable of carrying out peptide elongation.

[0114] The present invention provides therapeutically active soluble complexes comprising SAg and glycosphingolipids which have terminal or subterminal Gal(α1-4)Gal residues and Shiga toxin receptors Gb3 and Gb2, (collectively referred to as “GTSG1-4”). These complexes include but are not limited to SAg-GP1-GTSG1-4 complexes, and synthetic and functional derivatives thereof. Such structures appear naturally on surfaces of certain tumor cells such as astrocytoma, Burkitt's lymphoma and ovarian carcinoma. Methods of preparing and isolating glycosylceramides and VTs are given in Examples 41 and 55.

[0115] SAgs also have a demonstrable affinity for galactosylceramides containing Gal(α1-4)Gal residues. Methods of assessing SAg binding to GTSG1-4 are provided given in Example 43. These conjugates are also shed from SAg-transfected tumor cells as binary complexes of SAg-GTSG1-4 or ternary complexes of SAg-GPI-GTSG1-4, in free form, as vesicles or as exosomes(see Sections 38 and Example 38). Methods of isolating and characterizing these shed complexes appear in Section 38 and Example 42. The complexes may also be prepared by chemical or genetic methods (Example 5). SAg-GTSG1-4 or SAg-GPI-GTSG1-4 complexes or exosomes are useful as a preventative vaccine or against established tumor. They are also useful in vivo by direct administration or ex vivo where they are loaded onto antigen presenting cells comprising CD1 or MHC receptors to activate NKT and T cells to produce tumor specific effector T or NKT cells for adoptive therapy of cancer (Examples 5, 7, 14, 15, 16, 18-23, 38).

[0116] Therapeutic Construct: Tumor Cells Expressing SAgs and Galactosylsylceramides

[0117] Additional immunogenic complexes comprising SAgs bound to tumor cells, DCs DC/tc constructs expressing surface Gb2 and Gb3 or other glycosphingolipids containing terminal Gal(α1-4)Gal are prepared by transfecting these cells with nucleic acids encoding a SAg. The transfected cell expresses the SAg in the context of the glycosphingolipid comprising the terminal or subterminal Gal(α1-4)Gal moiety. Alternatively, free or GPI linked glycolipids containing SAg peptides or polypeptides bind to tumor cells or accessory cells in tissue culture (Section 38). The expression of Gb3 and Gb2 on tumor cells is optionally upregulated by various cytokines, including IFNα and TNFα, before contacting the SAg

[0118] Tumor cells, accessory cells or fused tumor/accessory cells transfected with SAg which are not naturally endowed with the GalCer (optionally coupled to SAg) acquire these molecules in free or GPI-linked form from surrounding media or by transfer from liposomes or vesicles (exosomes) which express them (Section 38 and Example 5). The resulting cells, coexpress SAgs and glycosylceramides or other glycosylceramides capable of stimulating an effective T or NKT cell immune response. Multidrug resistant (MDR) tumor cells or cell lines which naturally accumulate and express intracellular glycosylceramides are useful in this invention. MDR agonists such as SDA PSC 833, a cyclosporin analogue, and fumonisin B1, a ceramide synthase inhibitor, are employed to induce ceramide accumulation in MDR cells (Example 45). Tumor cells or accessory cells which overexpress key glycosylceramides due to transfection with a1-2, α1-4, α1-6 glycosyltransferases (Example 38) or a natural or induced deficiency of (α-galactosidase are also useful. In addition, tumor cells with high concentrations of GalCer expressed on their surface or that of accessory cells are generated by incubation with ceramides containing a 2-hydroxy fatty acid C6OH. Tumor cells selectively convert them to GalCer, galabiosylceramide and sulfatide in the trans-Golgi network where they are sorted and transported selectively to the cell surface. Methods for this selective biosynthesis of GalCer with hydroxy fatty acids are in Example 46.

[0119] These fused SAg-tumor cell/accessory cell constructs are used to activate a T or NKT cell population. They are used in vivo by direct administration or ex vivo to produce a population of tumor specific effector cells (T cells or NKT cells) for adoptive therapy of cancer (Examples 5, 7, 14, 15, 16, 18-23, 38).

[0120] SAg-VT Conjugates to Induce Tumor Cell Apoptosis

[0121] The present invention contemplates the induction of apoptosis in tumor cells expressing Gb2 and Gb3 (or other glycosphingolipids containing terminal Gal(α1-4)Gal) by using free SAgs, conjugates and fused DNA that comprises SAg, SAg peptide or SAg-encoding DNA fused to intact VT or to VT A or B chains. Preparation of these conjugates and fusion proteins from their corresponding DNA, polypeptides or functional derivatives is provided in Examples 1 and 5. These conjugates induce apoptosis by binding to tumor cell glycosphingolipid receptors having terminal Gal(α1-4)Gal. Methods of assessing tumor cell apoptosis are in Example 44. CD19 or IFN-αpeptide sequences and generic carbohydrate recognition domains which bind Gal(α1-4)Gal structures are also useful. CD19, a B-cell restricted differentiation antigen, naturally binds to Gb3 and Gb2 on the cell surface which includes apoptosis. CD19 has VT-like sequences in the N-terminal extracellular domain (NBRF protein data bank) that have 41%, 34% and 37% sequence identity to VT1, VT2, and VT2e B subunits, respectively. When compared to a consensus VT B sequence, the CD19 sequences show 49% identity. Binding of these peptide sequences to membrane Gal(α1-4)Gal-containing glycolipids facilitates receptor mediated induction of apoptosis.

[0122] The IFN-α receptor has a 63-kDa extracellular peptide with regions of amino acid identity to domains in the VT B subunit implicated as Gb2/Gb3 binding sites.

[0123] The preferred targets of the above conjugates on tumor cells are the naturally expressed Shiga toxin receptors Gb3 and Gb2 with a terminal Gal(α1-4)Gal. Astrocytomas and Burkitt's lymphomas are the preferred tumors as they naturally express glycosphingolipid receptors. However, any tumor expressing the appropriate receptor is appropriate. Tumor cells which express either engineered or natural functional derivatives, or mutants of these glycosphingolipid receptors, are also useful. Receptor expression on the target cells is optionally upregulated by cytokines such as IFN-γ and TNFα Tumor cell sensitivity to the cytotoxic effects of a VT is enhanced by administration of interleukin-1b before the addition of the conjugates. Tumor cells which do not naturally display Gb3 or Gb2 acquire these structures by transfer from free, soluble structures or liposomes which express the missing glycosphingolipid receptor (Section 38, Example 5). The reconstituted tumor cells bearing the appropriate glycolipid receptors are thus targeted for apoptosis by the above constructs and conjugates.

[0124] SAg Nucleic Acid-Verotoxin Conjugate

[0125] A preferred construct is the SAg-VT conjugate wherein the SAg is preferably in nucleic acid form (prepared according to Example 3). The VT portion of the complex binds to the tumor cell and initiates apoptosis. The VT also acts as a “vector” for transfer of the SAg nucleic acid into the cell. SAg-VT conjugates bind to the terminal Gal(α1-4)Gal receptors on tumor cell surfaces and are internalized via endocytosis. The SAg nucleic acid is internalized together with the VT. The VT A chain is an RNA N-glycosidase acting on the 60S ribosomal subunit. It induces apoptosis in the tumor cell by removing an adenine base on amino acyl-transfer RNA so that peptide chain elongation is blocked. The resulting apoptotic tumor cells contain the internalized SAg nucleic acid and are then ingested by dendritic cells. The DCs are cross primed to induce an effective anti-tumor response by presenting the tumor associated antigens in the class I pathway to T cells while the SAg nucleic acid expresses SAg polypeptide. These activated DCs or DC/tc hybrids can be prepared by the methods of Examples 28-29. They are used to activate a T or NKT cell population in vivo as a preventative vaccine or by direct administration against established tumor. They are also used ex vivo to produce a population of tumor specific effector cells (T cells or NKT cells) for adoptive therapy of cancer (Examples 5, 7, 14, 15, 16, 18-23, 28-29).

[0126] Glycosylation or lipid binding of the enterotoxin does not interfere with T cell binding and activating properties. The SAg is glycosylated by chemical or recombinant techniques described in the Examples 4. The SAg glycoprotein is the further conjugated to gangliosides in the ganglioside synthetic pathway via the presence of key signal peptides on the glyco-SAg (Example 4).

[0127] The SAg is also rerouted to the LAMP pathway, glycosylated in the Golgi apparatus and the endoplasmic reticulum and then translocated to the membrane class II receptor as a glycosylated ganglioside. Gangliosides are glycosylated to form glycosylceramides by recombinant techniques as described in the Example 4. They are also glycosylated by glycosyltransferases to form homologues which bind to hydrophobic regions of the SAg peptide. The final products namely SAg-glycosylceramides or SAg-LPS's then bind to CD1 receptors and are used to activate T cells or NKT cells. These construct are administered directly vivo or they are useful ex vivo to produce a population of tumor specific effector T cells or NKT cells for adoptive immunotherapy of cancer by protocols given in Examples 7, 15, 16, 18-23).

[0128] The present invention contemplates the fusion or coexpression within the same cell of SAg polypeptides with anomeric mono and digalactosylceramides which are expressed within a tumor cell or on the tumor cell surface. These construct could also be effectively expressed on the surface of accessory cells defined in Oxford Dictionary of Biochemistry and Molecular Biology 1997 edition as any one of various types of cell which assist in the immune response cell and includes but is not limited to DCs, fibroblasts, synoviocytes, astrocytes antigen presenting cells, neutrophils, macrophages, basophils, eosinophils, mast cells, keratinocytes and platelets, as well as fusion cells comprising accessory cells and tumor cells.

[0129] The anomeric mono and digalactosylceramides have been shown to activate NKT cells and to produce an anti-tumor response in the context of IL-12. The galactosyl ceramides have several structural requirements in order to produce anti-tumor effects. 12. Mono and digalactosylceramides require an anomeric galactose or glucose as the terminal sugar or inner sugar as for example anomeric 1,6-digalactosylceramide, -anomeric 1,2-digalactosylceramide, anomeric 1,4-digalactosylceramide, a diglycosylceramide wherein the inner sugar is an anomeric galactose or an anomeric glucose and anomeric galactosyl or anomeric glucosyl ceramide. In addition, the 3- and 4-hydoxyl groups on the phytosphingosine portion of the ceramides are preferably unsubstituted, the sphingosine base length is preferably from about 10 to about 13 carbon units and the fatty acyl chain length is preferably in the range of about 12 to about 24 for optimal anti-tumor effectiveness of the molecule.

[0130] The expression of anomeric mono- and digalactosylceramides in a cell is achieved by several methods. The first involves the transfection and amplification of nucleic acid encoding the enzymes which synthesize the anomeric 1,4-, the anomeric 1,6- or the anomeric 1,2.-mono- and digalactosylceramides such that these glycolipids are overproduced. The genes for these transferase enzymes have been cloned. Transfection of nucleic acid encoding these terminal transferases into the above cells is carried out in vivo by the methods described in Example 1.

[0131] A second method for creating cells that overexpress the foregoing glycolipids uses monensin or brefeldin which block additional glycosylation and sialylation of the -galactosylceramides, so that the mono- and digalactosylceramides accumulate in the cell.

[0132] A third approach employs cells from patients with Fabry's disease. These cells are genetically deficient in the -galactosidase so they naturally accumulate -galactosylceramides.

[0133] In a forth technique, an -galactosidase deficiency is induced in the target cell so that—galactosylceramides accumulate.

[0134] In a fifth approach, the -galactosyltransferase is transfected Fabry's disease cells, thereby adding to the usual accumulation due to the catabolic enzyme deficiency. Such cells should have massive accumulations of -galactosylceramides.

[0135] In a sixth approach, the desired mono- or diglycosylceramide expressed on liposome surfaces are transferred to tumor cells lacking these structures by co-culture and employment of fusion techniques given in example 5.

[0136] Nucleic acids encoding SAgs are transfected into the above cells which are overexpressing, overproducing or otherwise accumulating mono and digalactosylceramides. The Golgi apparatus (or Golgi complex) is a major site of synthesis of the foregoing glycolipids. In the present context, the SAg combines with it the mono and digalactosylceramides. From the Golgi, the SAg-galactosylceramide conjugates or complexes, with the appropriate sorting signals, are dispatched in transport vesicles to other destinations. For a SAg peptide to combine effectively with an -galactosylceramide, the peptide must first have the appropriate sorting signal which directs it to the Golgi, and from there, after complexing with the glycolipid, to the cell surface. The trafficking pathway of SAg polypeptide from the ER to the Golgi does not require special signals. SAg polypeptides that enter the ER (and fold and assembles properly) will automatically be transported through the Golgi apparatus to the cell surface unless they carry signals that either detain them in an earlier compartment en route or divert them (via the Golgi apparatus) to lysosomes or secretory vesicles. The SAg-glucosylceramide conjugates are routed from the Golgi to the cell surface after acquiring a structure like a cytoplasmic tail such as phosphoinositol which assures that these molecules will be bound in the cell membrane. The conjugates may also be routed to CD1 or MHC class I receptors, or via, the class II pathway, to MHC class II receptors by associating with invariant chain or LAMP-1 signals as described in Section 8.

[0137] The mono- and digalactosylceramides are capable of stimulating NKT cells (via an invariant chain) in the presence of IL-12 to produce an anti-tumor response. SAgs are capable of stimulating a T cell-dependent anti-tumor response.

[0138] The present invention utilizes tumor cells, accessory cells or hybrid cells such as DC/tc, engineered to express SAg-galactosylceramide for anti-tumor therapy. These cells may be administered as a preventative or therapeutic vaccine (Example 29). Alternatively, they may be useful ex vivo to activate an NKT or T cell population for use in adoptive immunotherapy of cancer (Example 29).

### 8. SAg Targeting to Lysosomes

[0139] LAMP-1 is a transmembrane protein localized predominantly to lysosomes and late endosomes. The cytoplasmic domain of LAMP-1 contains the amino acid sequence Tyr-Gln-Thr-Ile whose structure conforms to the Tyr-Xaa-Xaa hydrophobic amino acid motif that mediates cell membrane internalization and possibly lysosomal targeting of several surface receptors. The intracellular targeting of LAMP-1 is controlled by the Tyr-Gln-Thr-Ile motif located at the C terminus of its cytoplasmic tail.

[0140] In the present invention, nucleic acid encoding a SAg is fused with nucleic acids encoding the transmembrane and cytoplasmic tail of LAMP-1. Nucleic acids: encoding the signal peptide (N terminal) of LAMP-1 are integrated into this chimeric construct. These, chimeric SAg/LAMP-1 polypeptides are targeted to endosomal and lysosomal compartments, thereby rerouting transfected SAg polypeptides into the MHC class II processing pathway. Thus, cells such as tumor cells transfected with nucleic acid encoding this modified SAg preferentially target the SAg to lysosomal compartments and are presented to T cells in the context of MHC class II. MHC class II negative tumor cells are also transfected with nucleic acid encoding MHC class II molecules. The association of SAgs with MHC class II molecules, their natural ligands on APCs, produce optimal T cell activation to the tumor. Antigen presenting cells transfected with these constructs are capable of inducing potent activation of T cells. Tumor cells, in particular, transfected with this construct are administered directly in vivo or used ex vivo to sensitize a T cell population which is useful in adoptive immunotherapy of cancer by protocols described in Example 16, 18-23).

### 10. SAg Receptors

[0141] It is clear that certain tissues express receptors for enterotoxins that are not MHC class II and that binding is reserved for selected enterotoxins and not others. Non MHC cell II binding has been reported for colon carcinoma, mast cells epithelial cells and B cells. In a tumor bearing patient, it is desirable for administered SAgs to target tumor cells in vivo. which naturally express enterotoxin binding sites or receptors. Natural ligands for these receptors are native enterotoxins. However, because of the existence of naturally occurring enterotoxin specific antibodies in the circulation, native enterotoxins are incapable of binding target tumor cell or T cells. The isolated receptor is used to screen and identify SAg proteins and/or nucleic acids which bind to the native or chimeric receptor. SAg constructs are produced which target the tumor via its SAg receptor while also retaining T cell activating properties. In addition, T cells or NKT cells from tumor bearing patients are anergized in the course of tumor growth and are incapable of being used as a source of T cells for ex vivo stimulation and adoptive immunotherapy. After transfecting these cells with nucleic acids encoding enterotoxin receptors, they are capable of responding to exogenous enterotoxins and are once again a source of T cells useful in adoptive immunotherapy of cancer by protocols given in Examples 8, 9, 12, 16, 18-23.

[0142] Methods for receptor isolation purification and retrieval of cDNA are given in Example 12. The nucleic acids encoding SAg receptors are transfected into cells by methods given in Example 1 Tumor cells have a natural binding site for exogenously administered SAg polypeptides. In addition, nucleic acid encoding the SAg receptors are transfected into T cells, NKT cells, or γδ T cells of cancer patients which have been anergized in the course of tumor growth. The expression of the SAg receptor permits these cells to proliferate and produce TH1 cytokines in response to exogenous native SAg, Hence, these autologous T cell populations are useful in adoptive immunotherapy. Likewise, accessory cells are transfected with SAg receptor genes and used ex vivo to present SAg to T cells Further, the nucleic acid encoding the SAg receptor is transfected into T cells and fused, in frame, to the nucleic acid encoding the TCR-associated zeta chain or the IL-2 g to produce a chimeric receptor capable of generating a signal for cell proliferation and the release of TH1 cytokines after binding its natural ligand exogenous SAg.

[0143] In one embodiment, the enterotoxin receptor is immobilized as in Example 12 and used to screen oligonucleotide libraries for binding (Gold L, J. Biol. Chem. 270:13581-13584 (1995)). Avidly binding oligonucleotides are used to mimic the native enterotoxin by targeting the receptor in vivo. They are coupled to the TCR binding site of an enterotoxin peptide. In this way, the hybrid molecule is administered to the patient in a form protected from circulating enterotoxin-specific antibodies. Additionally, a nucleic acid molecule is prepared which mimics the enterotoxin in its ability to bind to the enterotoxin receptor on tumor cells and to the TCR on T cells. This nucleic acid mimicking the native enterotoxin is administered to the tumor bearing patients and is capable of targeting the enterotoxin receptor sites on tumor cell and the TCR without being eliminated by circulating enterotoxin specific antibodies as in Example 13, 18, 20-23.

### 11. Tumor Cells that Express SAgs and the αGal Epitope

[0144] Tumor cells are for the large part weakly antigenic and poorly recognized by the immune system. various attempts to increase the immunogenicity of tumor cells by transfection of various cytokines or histocompatibility antigens have for the most part been unsuccessful. Hyperacute rejection of xenografted organs is a very rapid and dramatic immune event often occurring within minutes of vascularization of the xenografted organs. Very recently, a major antigenic system on xenografts which is the target of this reaction has been identified as αGalβ1-3Galb β1-4GlcNAc or α-gal. This epitope is expressed in the tissues of pigs, guinea pigs, rodents, dogs, and cows but has not been detected in human tissue. The present invention improves the antigenicity of tumor cells and their recognition by the immune system by providing the α-gal epitope on the cell surface either alone or together with SAg expression.

[0145] The αGal epitope is expressed by endothelial cells in xenografts such as pig organs is a major antigenic target causing hyperacute organ rejection in human transplant patients. This hyperacute rejection appears to involve a complement dependent mechanism that occurs within a few minutes. An α1-3-galactosyltransferase, is an enzyme capable of producing α1-3-galactose-b1-4-N-acetylglucosamine moiety by adding a terminal galactose residue to a subterminal galactose residue via an α1-3 linkage. In addition, the a1-3-galactosyltransferase is not expressed by human and certain primate cells. Humans contain xenoreactive natural antibodies that recognize αGal. For example, anti-Gal antibodies bind to pig endothelial cells that express the Gal epitope. These anti-Gal antibodies are naturally occurring IgM antibodies recently found to be present in large amounts in human serum. Surface expression of the αGal epitope on tumor cells is achieved by transfecting a cell with a cDNA clone encoding the α1-3-galactosyltransferase. While tumor cells are the preferred cells for transfection, other cells such as accessory cells or immunocytes are also contemplated as being within the scope of this invention.

[0146] Nucleic acids encoding (α1-3-galactosyltransferase polypeptides are known (Sandrin, MS et al., Proc. Natl. Acad. Sci. USA 90: 11391-11395 (1993)). A cDNA clone encoding murine α1-3-galactosyltransferase is prepared using the known sequence of this protein and the polymerase chain reaction (PCR) technique (Dabrowski, P L et al., Transplant. Proc. 26: 1335-1337 (1994). Briefly, two oligonucleotide primers are synthesized: 5′-GAATTCAAGCTTATGATCACTATGCTTCAAG-3′, which is a sense primer that encodes the first 6 amino acids of the mature α1-3-galactosyltransferase and contains an HindIII restriction site; and 5′-GAATTCCTGCAGTCAGACATTATTCTAAC-3′, which is an anti-sense primer that encodes the last 5 amino acids of the premature α1-3-galactosyltransferase and contains an in-frame termination codon and PstI restriction site. These primers amplify a 1185 bp fragment from a C57BL/6 spleen cell cDNA library that is subsequently purified, digested with HindIII and PstI (Pharmacia LKB) restriction endonucleases, and directionally cloned into HindIII/Pst I-digested expression vector such as CDM8 vector. After verifying the correct sequence, the α1-3-galactosyltransferase-containing expression vector is transfected into heterologous cells such as COS cells to confirm activity. Activity can be confirmed by testing transfected cells for αGal expression using the IB4 lectin (Sigma) of Griffonia simplicifolia that binds to Gal residues.

[0147] In the preferred mode, cells transfected with nucleic acids encoding a SAg are co-transfected with nucleic acids that encode an α-galactosyltransferase. Alternatively, nucleic acids encoding the transferase are transfected into a separate cell population which is coadministered with the SAg transfected cell population.

[0148] The SAg-encoding nucleic acid can be transfected into cells which already express α-gal epitope. In addition, any cell can be transfected with the -galactosyltransferase-encoding nucleic acid. For example, α-gal-negative human tumor cells or tumor cell lines such as melanoma or adenocarcinoma are transfected with nucleic acid encoding the α-galactosyltransferase. Tumor cells transfected with -galactosyltransferase-encoding nucleic acid express the α-gal on their surface and are rapidly rejected when administered to a host with preexisting α-gal specific antibodies. Methods of transfection are given in Example 1.

[0149] Human tumor cells expressing the α-gal epitope after transfection, become strongly reactive with human serum containing preexisting antibodies to the αGal epitope. Thus, an αGal-expressing tumor cell is rejected after implantation.

[0150] The ability of α-gal-transfected tumor cells to induce rejection is demonstrated by implantation into severely compromised immune deficient (SCID) mice that have been reconstituted with human T and B cells and transfused with normal human plasma containing the naturally occurring human antibodies specific for the α-gal epitope. In this case, tumor cells transfected with -galactosyltransferase-encoding nucleic acid is rejected while untransfected cells are not. Similarly, tumor cells transfected with α-galactosyltransferase-encoding nucleic acid is rejected when implanted into species such as humans which synthesize antibodies to the α-gal epitope compared to untransfected control tumor cells that are unaffected by the treatment.

[0151] For example, pretreatment with 10⁵-10⁷ α-galactosyltransferase transfected tumor cells subcutaneously followed by implantation of untransfected tumor cells prevents the outgrowth of untransfected malignant tumor cells. Hence, the -galactosyltransferase transfected tumor cells function as a vaccine. Further, -galactosyltransferase transfected cells implanted into animals after untransfected tumors are established induce rejection of an established untransfected tumor.

[0152] To test for the presence of α-gal on a cell surface, α1-3 galactosyltransferase knockout mice that do not express the α-gal antigen are used. The α1-3 galactosyltransferase knockout mice are described elsewhere (Tearle et al., Transplantation 61:13-19 (1996) and Shinkel et al., Transplantation 64:197-204 (1997)). A syngeneic tumor cell that is α-gal negative such as B16 melanoma variants is transfected with nucleic acids that encode a given carbohydrate modifying enzyme. These transfected cells are then implanted into the knockout mouse that received plasma containing α-gal specific antibodies. Tumors do not grow in animals containing α-gal specific antibodies if the α-gal epitope is expressed.

[0153] Thus, hosts implanted with αGal positive tumor cells exhibit less growth than those exhibited in hosts implanted with tumor cells that are α-gal negative.

[0154] αgal negative transgenic animals are prepared which are useful for testing Gal expressing tumors. To produce these animals, nucleic acids encoding α-gal fucosyltransferase are transfected into α-gal positive mice. The fucosyltransferase dominates the usage of substrate N-acetyllactosamine and precludes -galactosyltransferase from utilizing this substrate. The transgenic mice do not express α-gal on the cell surface. In this way, transgenic mice with the H antigen rather than the Gal antigen develop. Transgenic guinea pigs producing minimal -gal are also created in this way. These animals are used as models for testing their capacity to reject syngeneic αGal positive tumors. These systems also permit the testing of α-gal specific antibodies for anti-tumor effects after they are passively infused into animals bearing Gal positive tumors.

[0155] Neuroblastoma and some melanoma cells overexpress several disialogangliosides, for example, GD2 and GD3. In the present invention, nucleic acid-encoding specific sialidases or glucosidases or neuraminidases that cleave terminal sialic acid or carbohydrate residues are transfected into cells that then express or overexpress a ganglioside with an exposed αGal epitope.

[0156] Fucosylated glycolipids such as B group antigens, Lewis blood group antigens, and L-selectin ligands are converted to the αGal epitope using the appropriate sialidases and glycosyltransferase enzymes. For example, a desialylating enzyme is introduced into B group antigen expressing cells such that the α-1,3-linked galactose is exposed and now recognized by αGal antibodies. Mild acid treatment to remove the branching fucose residues on the fucosylated B antigen is used to expose the α1,3 galactose residues. Alternatively, cells expressing the B antigen or selectin antigen are transfected with -galactosyltransferase-encoding nucleic acid that competes successfully with fucosyltransferases for N-acetyl-lactosamine substrate and preferentially expresses the αGal epitope

[0157] Nucleic acid encoding other polypeptides are also used to produce the surface expression of the αGal epitope such as nucleic acid encoding glycosidases that specifically cleave carbohydrate residues to expose the αGal epitope. Tumor cells transfected with nucleic acids encoding N-acetyl-glucosaminyl transferase show an increased tendency to metastasize and colonize new organs. These same tumor cells are cotransfected with nucleic acids encoding SAgs, Staphylococcal hyaluronidase and erythrogenic toxins as well as Streptococcal capsular polysaccharide which enables them to secrete enzymes and toxins locally inducing a potent inflammatory and immune response at metastatic sites.

[0158] Co-transfection of tumor cells with nucleic acid encoding SAg and nucleic acid encoding a galactosyltransferase, sialidase, and/or glycosyltransferase results in expression of SAg, GalCer, αGal, or other glycolipids on the cell surface. These tumor cells are used to stimulate T or NKT cells ex vivo to produce a population of tumor specific effector cells which are deployed for adoptive immunotherapy of cancer.

[0159] Mutation of the glycosyltransferase nucleic acid in tumor cells produces a specific LPS containing the Gal/Cer or the Gal which coordinated with genes for protein glycosylation produce the desired integrated SAg LPS.

### 13. Tumor Cells Expressing SAgs, Glycosylceramides and LPS's and their Receptors

[0160] It appears that anti-tumor responses are produced by a subpopulation of T cells known as NKT cells. These cells recognize glycosylceramides with certain specifications which are presented in the context of CD1 receptors on antigen presenting cells. They produce IL-12 mediated anti-tumor responses. Peptides of certain length with hydrophobic sequences have been shown to react with various hydrophobic regions of the CD1 receptor and produce an immune response. However, these peptides have not been implicated in an anti-tumor response. In the present invention, lipoproteins are contemplated which consist of SAg or their major bioreactive domains fused to glycosylceramides in the context of the CD1 receptor.

[0161] To make this construct, CD1 positive cells are transfected with nucleic acids encoding glycosyltransferases that result in GalCer or GlcCer expression on the cell surface and preferably in the context of the CD1 receptor. The appropriate glycosyltransferase nucleic acid is obtained from Sphingomonas paucimobilis or Agelas mauritianus which are known to express the GalCer on their cell surface. The GalCer and GlcCer moieties are recognized by NKT cell Vα invariant chains in the context of CD1 receptors on antigen presenting cells. CD1 positive cells are cotransfected with nucleic acids encoding SAgs The resulting CD1 positive cells coexpress both GalCer and SAg on the cell surface or in the context of CD1. The GalCer and SAg presented simultaneously as a complex and/or separate from each other on the cell surface, in the context of CD1 produces potent activation of NKT cells due to recognition of SAg by NKT cell Vβ chain and GalCer by the Vα invariant chain. Such GalCer-SAg complexes are loaded onto the CD1 receptor and presented to NKT cells in this fashion. A SAg peptide capable of binding to the TCR and activating the T cell is useful for coupling to the GalCer before or after it is positioned on the CD1 receptor. (See Examples 1-4, 5).

[0162] CD1 positive antigen presenting cells or tumor cells bearing the SAg glycosylceramide are used to stimulate a population of γ/δ T cells and/or NKT cells ex vivo which is then useful in adoptive immunotherapy of cancer by protocols given in Examples 7, 15, 16, 18-23, 68. They are also useful when, administered directly in vivo to tumor bearing patients to produce an anti-tumor response. (See Examples 18-23).

[0163] In the present invention, nucleic acids encoding the CD1 receptor are transfected into tumor cells in vivo or ex vivo. Martin L H. et al. Proc. Natl. Acad. Sci. USA 83: 9154-9158 (1986). Nucleic acids encoding the CD1 receptor are also cotransfected into tumor cells with nucleic acids encoding the SAg receptor. A tumor cell expressing a chimeric receptor comprising sequences of CD1 and SAg receptors is also produced by transfection of fusion nucleic acids encoding both receptors. The transfected tumor cell expresses either dual or chimeric receptors which bind SAg and GalCer independently or as fusion protein or conjugate. Likewise, tumor cells are transfected with nucleic acids encoding CD14, the LPS receptor, (Ferrero, E. et al., J. Immunol. 145: 331-336 (1990)) a leucine rich receptor glycoprotein found on myeloid cells with a LPS binding site between amino acids 57-64. Nucleic acids encoding CD14 are transfected into tumor cells together with nucleic acids encoding SAgs and resulting tumor cell expresses several receptors or a single chimeric receptor with preserved consensus binding sequences common to each. These tumor cell transfectants are capable of binding exogenous SAg and/or LPS and or GalCer. The resulting tumor cells with bound SAg, and/or Gal/Cer and/or LPS activate a population of T cells, γ/δ T cells and/or NKT cell to produce tumor specific effector cell which are useful in the adoptive immunotherapy of cancer by methods in Example 1-7, 12, 15, 16, 18-23, 68). The tumor cell transfectants are also administered as a vaccine or to hosts with established tumors as in Example 19-23.

[0164] Alternative splicing and utilization of cryptic splice sites generates alternative reading frames and secretory isoforms of CD1, CD14 and SAg receptors. Woolfson A. et al., Proc. Natl. Acad. Sci. USA 91: 6683-6687 (1994). These soluble receptors are immobilized on solid surfaces such as polystyrene plates or beads and bind their respective ligands e.g. GalCer and SAg. In this form, the GalCer and SAgs activate T cell or NKT cell to produce a population of tumor specific effector T cell, γ/δ T cell, NK cell or NKT cells useful in adoptive immunotherapy of cancer by methods given in Examples 7, 15, 16, 18-23, 65).

### 14. SAg-Activated Tumor Specific T Cells, NKT Cells or γ/δ T Cells Expressing CD44 for Adoptive Immunotherapy

[0165] It is imperative that T cells, NKT which are stimulated in vivo or ex vivo by the SAg constructs after SAg stimulation, is an indicator of upregulated adhesive capacity which is requisite for the homing of SAgs to tumor sites. T cells or NKT cells or cells transfected with nucleic acids encoding SAg receptors i.e., tumor cells or accessory cells are stimulated by SAgs in vivo or ex vivo to express CD44. These CD44 expressing T cells are enriched and expanded and then harvested for use in adoptive therapy of cancer by protocols given in Examples 7, 15, 16, 18-23.

[0166] Transfection of cDNAs encoding soluble isoforms of CD44 into tumor cells results in the local release of soluble CD44 which inhibits the ability of endogenous cell surface CD44 to bind and internalize hyaluronate and to mediate tumor cell invasion. Mice injected with tumor cell transfected with the CD44 isoform showed not tumor metastases. Such tumor cells were shown to undergo apoptosis. These transfectants displayed a marked reduction in their ability to internalize and degrade hyaluronate. Therefore, CD44 function promotes tumor cell survival in invaded tissues possible as a result of impairing their ability to penetrate the host tissue hyaluronan barrier. In the present invention, SAg-encoding nucleic acid is co-transfected or fused to nucleic acids encoding CD44 isoforms. These transfected cells are capable of migrating to sites of metastatic tumor in tumor bearing hosts and eliciting a potent anti-tumor response. The combined apoptotic effect to the CD44 isoform with the enhanced immunogenicity of the SAg produces a powerful synergistic anti-tumor response. The nucleic acids encoding the CD44 isoform and SAg are transfected into accessory (DC)/tumor cell hybrids. In addition, to presenting tumor antigen and SAg to the immune system and inhibiting metastases, the CD44 isoform produces apoptosis of the fusion cell which in turn is ingested by DCs resulting in enhanced immunogenicity and a more potent tumoricidal response. These combined transfectants are used preferably against established tumor according to protocols in Example 19-23.

[0167] NKT cells or T cells that do not produce CD44 after SAg stimulation do so after transfection with nucleic acids encoding CD44 or transferases such as N-acetylglucosaminyl transferase III or CD44 (Sheng, Y. et al., Int. J. Cancer 73, 850-858 (1997); Nottenberg, C. et al., Proc. Natl. Acad. Sci. USA 86: 8521-8525 (1992)). The latter enzyme synthesizes bisecting N-acetylglucosamine structures on asparagine linked oligosaccharides. Glycosylation of CD44 by these transferases produces enhanced CD44 mediated adhesion to immobilized hyaluronate. SAgs are used to activate T cells which have been transfected with nucleic acids encoding N-acetylglucosaminyltransferase III. The SAg stimulated transfectants display increased CD44-mediated adhesion. as well as lymphocyte homing and trafficking. Certain T cell, NKT cell or/T cell populations which are unable to express CD44 after SAg stimulation are transfected with nucleic acids encoding CD44 before sensitization with SAgs. These cells express CD44 after immunization with SAgs in vivo or in vitro. These additional populations of effector T cells are useful in adoptive immunotherapy of cancer by methods given in Examples 5, 7, 15, 16, 18-23.

### 15. Tumor Associated Antigens

[0168] Tumor associated antigens include:

[0169] (1) Normal structures, e.g., differentiation or tissue specific antigens,

[0170] (2) Mutated normal structures

[0171] (3) Products of alternate reading frame or fusion of several genes

[0172] (4) Chimeric products resulting from cell or gene fusion

[0173] (5) Xenogeneic antigens (“xenoantigens”)

[0174] A tumor antigen (also called “tumor associated antigen) is any antigenic structure expressed by a tumor cell. For example, tumor antigens include mutated products of various oncogenes and p53 genes that are expressed in tumor cells generally. Many tumor antigens associated with particular types of cancers are known. For example, tumor antigens associated with breast, colon, and lung cancer are known and have been cloned. Common melanoma antigens recognized by T lymphocytes have been identified and are used as immunotherapeutic antigens for treatment of melanoma. Five genes encoding different melanoma antigens have been identified. For example, MAGE1 and 3, expressed on melanoma and other tumor cells, are recognized by cytotoxic T lymphocytes (CTL) in the context of HLA-A1 (Van der Bruggen P et al., Science 254:1643 (1991) and Gauler B et al., J. Exp. Med. 179:921 (1994)). MART-1 identical to Melan-A (Kawakami et al., Proc. Natl. Acad. Sci. USA 91:3515 (1994) and Coulie et al., J. Exp. Med. 180:35 (1994)); gp100 (Kawakami et al., Proc. Natl. Acad. Sci. USA 91:6458 (1994)); and tyrosinase (Brichard et al., J. Exp. Med. 178:48 (1993)) are melanocyte lineage-related antigens expressed on both melanoma and melanocytes. MART-1 and gp100 have been shown to be recognized by MHC-class I-restricted CTL in the context of HLA-A2, and tyrosinase in the context of HLA-A2 and HLA-A24 [Robbins et al., Cancer Res. 54:3126 (1995)]. An additional list of tumor antigens useful in this invention is given in Rosenberg, SA. “Principles and Applications of Biologic Therapy in Cancer,”: In: Principles and Practice of Oncology, DeVita, VT et al., eds, J. B. Lippincott Co., Philadelphia, Pa. 1993.

[0175] In addition tumor associated antigens are defined as including normal structures expressed in tumor cells, mutated normal structures, normal differentiation- or tissue-specific structures, products of alternate reading frames of the same genetic regions, chimeric products of several genes that originated in a parental or in a fused, hybrid cell. This also includes gene products expressed in association with MHC molecules or other surface receptors, organelles or vesicles.

[0176] Tumor cells expressing tumor-associated antigens are transfected in vivo or ex vivo with nucleic acids encoding a SAg alone or together with nucleic acids encoding other products, such as those listed in Tables I and II. These include surface antigens and receptors such as the Gal epitope, GalCer, CD1, CD14 and SAg receptor.

[0177] The transfected cells may be of host origin, or syngeneic, allogeneic or xenogeneic; the cells may be non-malignant. SAg-encoding nucleic acid may also be inserted into a mutated normal gene in a tumor cell, e.g., LDL receptor gene in a melanoma cell. The LDL receptor is expressed as a fusion product of the LDL receptor gene (chromosome 19) and a fructose transferase gene on the same chromosome. This combination results from chromosome inversion which gives rise to the fusion product probably due to recombination between the two ends of this chromosome. The expressed peptide epitope is therefore a nonsense sequence being read in the wrong direction. The three base pair mutations in the third open reading frame results in the expression of a mutant peptide. Site directed mutagenesis can be achieved by insertion of SAg-encoding nucleic acid into the mutant gene at any feasible site or by targeting insertion in place of the mutated base pairs. The resultant LDL receptor displays the SAg alone or as a chimera with the mutant sequence. Site directed mutagenesis by SAg-encoding nucleic acid may also target the β-catenin gene which in melanoma shows a single C-T mutation which results in a ser to phe substitution and the generation of the 9 amino acid mutant peptide. The SAg-encoding acid may be inserted or may substitute for any sequence in a normal non-mutated gene, a tissue-specific or differentiation-associated gene in tumor cells, or other genes expressing their products in a tumor cell. Preferably, the mutated gene product is immunogenic and recognized as a dominant epitope by the host immune system, preferably by T cells (including tumor infiltrating lymphocytes). The mutated sequence may, in contrast, be a weak immunogen which is rendered more immunogenic when presented in the context of a SAg.

[0178] In the preferred embodiment, the transfected cells are tumor cells of host origin expressing a defined tumor associated antigen such as MART-1. If the tumor antigen is not expressed or weakly expressed on the transfected cells, then the tumor cell is transfected with nucleic acids encoding an immunogenic tumor antigen such as MART-1, tyrosinase or MAGE-1 in addition to SAg and other constructs described herein.

[0179] The tumor cells may be transfected in vivo by administering nucleic acids encoding SAgs and/or the other nucleic acid constructs described above using a site directed mutagenesis approach in vivo and methods such as described in Example 1, 3, 18-23. Tumor cells may also be transfected ex vivo by methods given in Example 1-3. Ex vivo transfected tumor cells are used as vaccine or to treat established tumor by methods and protocols in Example 18-23 They are also useful ex vivo to immunize T cells, γ/δ T cells, NK cells or NKT cells to produce a population of tumor specific effector cells adoptive immunotherapy of cancer by methods and protocols given in Examples 7, 15, 16, 18-23, 68.

### 16. Immunostimulatory Sequences

[0180] Several of constructs consist of nucleic acids encoding SAg peptides which produce anti-tumor responses by activating host TH-1 CD4+ T cells to proliferate and produce tumoricidal cytokines such as IL-1α, IL-1β, IL-2, IL-6, TNF-α, TNF-β and IFN-γ. The incorporation of the immunostimulatory sequence into the genetic construct of SAg DNA, ensures that the T cell response is skewed to produces a predominant proliferation of TH1 cells and production of a TH1 cytokine profile. Immunostimulatory sequences (ISS) consist of DNA sequences that exhibit immunogenicity. Briefly, plasmid DNA (pDNA) having short immunostimulatory DNA sequences containing a CpG dinucleotide in a particular base context were shown to be immunogenic (Tokunaga J et al., J. Natl. Cancer Inst. 72:955-962 (1984)). By synthesizing single stranded nucleotides corresponding to different regions in the Mycobacterium bovis genome, specific single stranded oligonucleotides that activate adherent splenocytes and enhanced natural killer cell activity have been identified. In addition, single stranded oligonucleotides with CpG motifs induce B cell proliferation and secretion of IL-6 and IFN (Krieg et al., Nature, 374:546 (1995)). The activation capability generally has the formula 5′-Pur-Pur-C-G-Pyr-Pyr-3′. Further, human monocytes transfected with pDNA or double stranded oligonucleotides containing ISS transcribed large amounts of IFN-γ and IL-12 (Sato et al., Science 273:352-354 (1996); Zhu et al., Science 261, 209-211, (1993)) Direct gene transfer with plasmid-cationic liposome complexes resulted in lasting, generalized or tissue specific expression of the injected genetic phenotype. Similarly, any RNA or DNA vectors carrying nucleic acids encoding SAg alone or associated with additional therapeutic nucleic acids which are enhanced by optimizing promoters, introns, and polyadenylation signals (Donnelly, J J et al. Annu. Rev. Immunol. 15: 617-648 (1997)) are also useful in augmenting expression of SAg and enhancing an anti-tumor effect.

[0181] In the present invention, the ISS is inserted into nucleic acid sequences of SAgs and tumor associated antigens which are used to transfect tumor cells, antigen presenting cells, accessory cells including muscle cells in vitro or in vivo by methods given in Example 1-3, 15, 16, 18-23. In all instances, the SAg stimulation of the T cell response is critical to an effective anti-tumor response of the host. The presence of the ISS ensures that the SAg nucleic acids preferentially activate the TH1 after in vivo administration of the nucleic acids encoding SAg. SAg DNA is useful ex vivo in activating T cells, γ/δT cells and NK cells and NKT cells by direct transfection or by presentation via incubation with pretransfected antigen-presenting cells or tumor cells. The tumor specific T effector cell are then useful for adoptive therapy of cancer using protocols given in Examples 7, 15, 16, 18-23, 68). A particularly useful method involves the intratumoral injection of nucleic acids encoding SAgs. The latter is administered in naked, plasmid or liposomal form. Once tumor inflammation is initiated (generally within 15 days after injection), the host is given T cells or NKT cells which have been immunized in vitro to the tumor by tumor cells transfected with nucleic acids encoding SAg plus additional constructs given in Tables 1 and II by methods given in Examples 7, 15 16 18-23.

### 17. Liposomes

[0182] Liposomes containing repeating units of the α-gal epitope, GalCer, and/or SAgs are constructed and administered directly into a tumor. These elements are combined before incorporation into liposomes or they are added individually in the preparative procedure. Methods for preparation of these liposomes are given in Examples 5. These liposomes are preferentially delivered parenterally or directly into the tumor. The administration of SAgs in this manner provides a high local concentration of SAg to stimulate an anti-tumor response. These liposomes are also useful ex vivo by activating a T cell, γ/βT cell, NK or NK T cell population which is then harvested and used for adoptive immunotherapy as described in protocols in Examples 5, 7, 15-17, 18-23, 68).

### 18. Tumor Cells that Induce Cellulitis

[0183] Transfection with microbial nucleic acids that encode tissue spreading factor (hyaluronidase), erythrogenic toxins, enterotoxins; capsular polysaccharides from S. aureus and Streptococcus pyogenes, S. aureus and S. pyogenes have potent tissue invasive properties. Specifically, Staphylococcus and Streptococcus are capable of invading tissues by secreting several enzymes which lyse ground substance such as mucopolysaccharide, hyaluronic acid, or chondroitin sulfate, create local thrombosis, and initiate inflammation and edema. These enzymes consist of hyaluronidase, streptokinase, streptodornase, erythrogenic toxins as well as various enterotoxins (Example 3). In the present invention, the nucleic acid sequences encoding these potent enzymes are transfected into tumor cells, either in vitro or in vivo (Examples 1-3, 6, 15, 16, 18-23). In vivo, the transfected tumor cells migrate to sites of existing metastases. The transfected tumor cells secrete the enzymes which hydrolyze the tumor ground substance and neovasculature and toxins to induce inflammation and an immune response in tumor tissue. Tumors which are encased in nests of connective tissue are eliminated by this process. The resulting increase in local vascular permeability induced by the combined effect of enzymes and toxins produces intense inflammation at tumor sites. If their administration is timed to the peak of tumor inflammation, liposomes as described herein and chemotherapy are sequestered and concentrated in the inflamed tumor bed producing an, augmentation of the tumoricidal response.

[0184] A relatively low number of transfected tumor cells with the complete microbial enzymatic and toxin genetic construct would be required to induce a tumoricidal effect. The population of transfectants would then proceed to secrete these microbial enzymes locally. In addition, nucleic acid encoding these enzymes are derived from a strain of Staphylococcus or Streptococcus such as Staphylococcus epidermidis or Streptococcus bovis of low or intermediate virulence.

[0185] Tumor cells are cotransfected with glycosyltransferases or treated with glycosyltransferase-inducing agents resulting in the expression of the α-gal epitope and reduction in the survival time of tumor cells For example, the nucleic acids encoding the glycosyltransferase from Sphingomonas paucimobilis or Agelas mauritianus produce GalCer are transfected into tumor cells to induce the surface expression of GalCer or α-gal. The tumor cells then express and/or secrete microbial agents such as SAgs, hyaluronidase and erythrogenic toxins that hydrolyze the ground substance of the tumor. By also displaying SAgs and -Gal or Gal/Cer epitopes which activate NKT cells, T cells, and Gal specific antibodies the transfected tumor cells induce profound tumoricidal activity. These transfected tumor cells are used to activate a population of T cells including αβ T cells γ/δ T cells, NK and NKT cells to become tumor specific effector cells which are employed for the adoptive immunotherapy of cancer. See Examples 1, 2, 4-5, 7, 15, 16, 18-23.

[0186] For in vivo transfection of tumor cells, the microbial genetic nucleic acids are targeted to tumor cells as described herein (See p. 12 “Transfection”, Examples 1-3, 6, 19). Once localized in tumor sites in vivo, the tumor cell is capable of hydrolyzing surrounding stroma and, initiating thrombosis, inflammation, and increased tissue permeability. Additional microbial nucleic acid encoding proteinases, lysoproteinases, tissue spreading factors, a and b hemolysins and toxins are also transfected into tumor cells and used in accordance with this invention.

[0187] Micrometastatic disease in cancer patients is of great concern as it often goes undetected and is refractory to chemotherapeutic agents. Documented metastases in breast cancer patients is associated with a poor prognosis. The present invention contemplates that the metastatic properties of tumor cells coupled with the potent inflammatory properties of the microbial products are useful in tracking and eliminating micrometastatic disease in tumor bearing patients. Tumor cells are transfected with nucleic acid encoding polypeptides involved in metastasis. These include but are not limited to, peptides that upregulate the adhesive properties of CD44 (e.g., glycosyltransferases), the c-erbB-1 encoded EGF receptor which is associated with enhanced metastases in breast carcinomas or c-erbB-2/neu encoding the p185 receptor associated with poor prognosis in breast and ovarian carcinomas. These cells with metastatic activity are programmed to traffic, home and colonize specific sites of existing metastases the tumor bearing host. Hence they have the unique property of charting the micrometastatic sites of the tumor. These tumor cells are cotransfected with microbial nucleic acids encoding the hyaluronidase, erythrogenic toxin and enterotoxins as well as the α-gal. Hence, as they colonize metastatic sites, these transfectants induce a potent inflammatory and immune response. This ensures their own destruction together with the surrounding untransfected micrometastatic tumor cell population and neovasculature and stroma. Methods of preparation, administration and assessment of these transfectants in tumor bearing hosts are in Example 1-3, 18-23.

[0188] The tumor cells are also transfected with the above microbial genes on a DNA template with a tissue specific promoter in order to target the activity of these transfected tumor cells to the vital organs (and sites therein) affected by the existing metastatic tumor. For breast cancer, this would be lung, liver or brain. These organ-specific promoters ensure that the expression of the microbial products would occur in the organ(s) targeted by the tissue specific promoter

[0189] The same tumor cells are also provided with inducible promoter sequences which control the level of receptor transcription and expression. Inducible promoters suitable for use in mammalian cells include the MMTV-LTR under the control of steroid hormones and the metallothionein promoter under the control of heavy metal ions. In this case, the microbial nucleic acids are linked to steroid inducible gene sequences. Transcription is triggered when these cells are exposed to a threshold level of steroids. Hence, two to three days after administration to the host, when the above transfectants have colonized tumor metastatic sites, a bolus of corticosteroid is administered which initiates transcription of the microbial enzymes and toxins by the tumor cell transfectants and their secretion. In this fashion, the transfected tumor cells express and secrete their inflammatory products in metastatic tumor sites resulting in the elimination of metastatic disease.

### 19. Tumor Cells as Mimics of Virulent Bacteria: Transfection with Nucleic Acid Encoding Bacterial Invasins, Virulence Factors, and Enzymes that Degrade Extracellular Matrix

[0190] Tumor cells with a metastatic phenotype are transfected with nucleic acids encoding proteins with the capacity to invade and adhere to inflammatory cells such as macrophages (adhesins and virulence factors). These genes are inducible and controlled by operons.

[0191] SAg-encoding nucleic acid is fused in frame to nucleic acid encoding oncogenes involved in tumorigenesis and metastasis. Examples of such genes, in addition to erb/neu, crb, crbB2 and EGF (epidermal growth factor receptor) discussed above, include ras and mutated ras, erk, and mtal, 182 mts1, nm23 (See p 181 of Franks L. M. et al., Cellular and Molecular Biology of Cancer, Oxford University Press, Oxford UK, (1997) which is incorporated by reference), as well as the laminin-integrin and the cadherin family. These genes are particularly useful because they are overexpressed in tumor cells displaying a metastatic phenotype.

[0192] Invasins SAg-encoding nucleic acid is fused in frame or cotransfected into tumor cells with nucleic acids encoding bacterial invasins and hyaluronidases. The invasin imparts leukocyte like activity to bacteria is transfected into tumor cells which allows the tumor cells to penetrate tissues. These are exemplified by Yersinia pseudotuberculosis invasin and hyaluronidase (including its various isotypes) and also known as tissue spreading factors. The invasin gene exemplified in Y. pseudotuberculosis encodes a protein located in the outer membrane of the bacterium called invasin (Inv) and the gene is known as inv. The DNA region of the inv gene contains a open reading frame 2964 bases. This protein binds to the host cell surface by means of the C-terminal 192 residue region. Mutation by insertion of a transposon or elimination of the inv gene greatly impairs the ability of the bacterium to penetrate tissues (Schaecter M et al., Genetics of Bacteria edited by Baer G M et al., in Mechanisms of Microbial Disease Williams and Wilkins Baltimore (1993)).

[0193] The host membrane receptors for invasin belong to the integrin superfamily with a particular affinity for VLA-3, 4, 5, 6. Invasin also bind to T cell α₄β which is involved in lymphocyte homing or traffic. Once bound to a phagocyte, phagocytosis is triggered and the bacterium is taken up. Nucleic acids encoding Inv are transfected into tumor cells which confers upon the tumor cell a phagocytosis triggering signal for host macrophages.

[0194] E. coli genes of the P pili or pap operon encoding adhesin proteins have been isolated from chromosomes and plasmids. The gene cluster is linked to genes for other virulence determinants such as the KI capsular polysaccharide and hemolysin. The receptor for the pili is the αGal(1-4)Gal moiety of the P blood group antigen. Examples of host cell receptors for bacterial adhesins is given in Table 7.2 of Patrick and Larkin. Pilin genes in N. meningitidis encode proteins is which the fimbriae are the N-methylphenylalanine pili. An extensive region of amino acid homology at the N-terminal end is common to a wide range of bacterial genera including Pseudomonas aeruginosa, N. gonorrhoeae, N. meningitides, Moraxella bovis and Bacteroides nodosus. This N-terminal region is highly hydrophobic which is in contrast to the fimbriae of the Enterobacteriaceae which either have a hydrophobic region at the C-terminal end or lack a hydrophobic region altogether. Of interest is the presence of a site on SAgs which resembles the third Ig-like disulfide-bridged loop of VCAM-1 and a conserved sequence is present within the same subregion of the fifth Ig-like VCAM-1 loop. The only known receptor for the VCAM-1 is VLA-4, an adhesion molecule expressed primarily by activated T and B cells. A survey of target cell susceptibility to SEC dependent lysis shows a correlation between VLA-4 expression and susceptibility to lysis.

[0195] Superantigens Fused to Invasins

[0196] Superantigens are fused to nucleic acids encoding invasin molecule or the integrin binding sequences of the invasin molecule. Invasin is a 986 amino acid outer membrane protein that tightly binds at least five different β,-chain integrins prior to uptake in-cultured cells (Isberg et al., 1987; Isberg et al., 1988, E. Krukonis et al., unpublished observation). The C-terminal 192 amino acids of the protein contains the integrin binding activity of invasin (Leong et al., 1990) and this region is also sufficient to promote entry when used to coat non-invasive bacteria, such as S. aureus (Rankin et al., 1992). The N-terminal portion of invasin is required for secretion to and proper localization within the bacterial outer membrane (Leong et α, 1990). Integrins are a large family of heterodimeric receptor'that mediate a variety of cell-cell and cell-extracellular matrix interactions (Hynes, 1992). In addition, residues within an 11-amino acid region encompassing residues 903-913 are also critical for cell binding. One of these residues, aspartate 911 (Asp-911), appears to be absolutely essential for binding, as changes at this position result in complete loss of integrin binding.

[0197] The Yersinia pseudotuberculosis invasin protein mediates bacterial entry into mammalian cells by binding multiple β,-chain integrins. Integrins are a large family of heterodimeric receptors that mediate a variety of cell-cell and cell-extracellular matrix interactions (Hynes, 1992). Invasin binding to purified α₅β_{L}, integrin is inhibited by Arg-Gly-Asp (RGD)-containing peptides, although invasin contains no RGD sequence.

[0198] The inv gene has been cloned (Young V B et al., Mol. Microbiol. 4: 1119-1128 (1990). Fifteen mutations that diminished binding and bacterial entry were isolated after mutagenesis of the entire inv gene. All of the mutations altered residues within the C-terminal 192 amino acids of invasin, previously delineated as the integrin binding domain, and 10 of the mutations fell within an 11 residue region. When this small region is subjected to site-directed mutagenesis, almost half of the 35 mutations generated decreased invasin-mediated entry. D911 within this region is the most critical residue, as even a conservative glutamate substitution abolished bacterial penetration.

[0199] The fusion protein consisting of a superantigen (SEs, SPEs or Yersinia and other non SE or SPEA, superantigens) fused to an invasin are prepared as in Example 5. They are used for treatment of established and metastatic tumor or as a preventative vaccine as described in Examples 14-16, 18-23.

[0200] Hyaluronidases and Proteases

[0201] Bacteroides species produce hyaluronidase, heparanase, and chondroitin sulfatase enzymes. C. perfringens m toxin is a hyaluronidase enzyme and Bacteroides and C. perfringens produce elastase and collagenase enzyme while Porphyromonas gingivalis has a cell associated collagenase. Streptococcus pyogenes produces hyaluronidase enzymes which depolymerize their own capsules. Neuraminidases and endoglycosidases, lipases, nucleases and proteases produced by a wide variety of bacteria are also useful in this invention as capable of promoting tissue necrosis in tumor masses and/or tumor nests.

[0202] The staphylococcal invasive genome is predominantly chromosomal and the nucleic acid segments encoding the major invasive enzyme systems, permeability factors, and toxins have been isolated, cloned, and sequenced. For example, the nucleic acid sequence encoding a hyaluronidase from group A Streptococcus strain 10403 is described elsewhere (Hynes et al., Infect. Immun. 63:3015-3020 (1995)). Tumor cells transfected with nucleic acids encoding microbial invasive and inflammatory substances are preferentially used in vivo where they are programmed to traffic to metastatic sites and/or organs primarily infiltrated by the tumor. Once situated in tumor, they commence secretion of their inflammatory enzymes and toxins. Protocols for their preparation, use, and assessment are given in Examples 1-3, 18-23.

[0203] Consolidation of Bacterial Genes

[0204] The microbial nucleic acids encoding hyaluronidase, erythrogenic toxins proteases, coagulases and enterotoxins are consolidated into a chimeric construct or plasmid and transfected into tumor cells which then commence secretion of the spreading factors, pro-inflammatory and permeability inducing agents. For example, a single construct or multiple constructs contains the nucleic acid encoding polypeptides including, without limitation, enterotoxin B, hyaluronidase, streptokinase, coagulase, Staphylococcal protease and erythrogenic toxins.

[0205] Tumor cells transfected with the above microbial genes are prepared as in Example 1-3 and are used in the treatment of established and metastatic tumor or as a preventative vaccine as described in Examples 15-23.

### 20. Combined Expression of Different Stimulatory Molecules by Co-transfection of Tumor Cells or Fusion of Singly Transfected Cells

[0206] Tumor cells that express two different types of exogenous molecules are produced by either cotransfection of the same cells with (a) SAg-encoding nucleic acid and (b) nucleic acid encoding a toxins or autolysin, or by fusion of tumor cells that have been singly transfected with (a) with tumor cells transfected by (b) Tumor cells are provided which have the dual capacity to colonize metastatic tumor sites in vivo and induce inflammation. Once situated in sites of tumor metastasis, the tumor cells behave like a necrotizing bacterium or leukocyte. For example, tumor cell are transfected with nucleic acids encoding bacterial invasins to promote adhesion, “tissue spreading factor” or hyaluronidase to hydrolyze the ground substance, coagulase to induce local thrombosis and streptokinase and streptodornase. In addition, tumor cell are provided with nucleic acids encoding bacterial toxins which bind and produce autolysis and cytotoxicity for surrounding tissue and tumor cells. The tumor cells are also cotransfected with additional nucleic acids encoding SAgs. The toxin genes useful herein are amplified by providing two copies tandemly duplicated on a chromosome and linked to an amplified oncogene. Situated in tumor tissue, these transfected tumor cells release enterotoxins as well as inflammatory enzymes, immunogenic capsular lipoproteins, cell wall LPS's and cytolysins. This evokes a potent T cell and inflammatory response in tumor tissue. These inflammatory genes are inducible at the level of the operon or in some instances bacteriophage which controls their activation. Transfected tumor cells are transfected with microbial nucleic acids given above either in vitro or in vivo at tumor sites as in Example 1-3, 5, 16-23 and p.11 under “transfection”.

[0207] The S. aureus α toxin forms pores or transmembrane channels in a wide range of host cells. It is released from the bacteria during exponential growth and has a molecular mass of 33 kDa. Expression of the gene encoding the a toxin, hly, is under the control of the agr gene which coordinately controls the expression of a number of extracellular proteins, including exfoliatin toxin, toxic shock syndrome toxin, a, b, and d toxins, enterotoxin B, lipases and nucleases. The β toxin is a phospholipase which attacks a sphingomyelin in the cell membranes. The phage encoding the toxin is hlb. Exfoliatin toxin A is encoded by a chromosomally located gene eta and the gene for toxin B is etb. The eta gene is by the agr gene regulator which is a member of the histidine-protein kinase response regulator superfamily. (Patrick S et al., Immunological and Molecular Aspects of Bacterial Virulence, John Wiley and Sons New York, N.Y. 1995)

[0208] SEB binds to glycosphingolipids on cell membranes. The ganglioside binding site on SEB is overexpressed, or a myristoylation site or GPI binding site is integrated into its structure so that it is bound to the surface of the tumor cell membrane and not secreted. The SEB will preferentially bind to tumor cell expressing ganglioside tumor associated antigens and will augment the immunogenicity of these antigens.

[0209] S. aureus produces a bifunctional protein autolysin of 110-kDa,(HlyA) via the atl gene that has an N-acetylmuramoyl-L-alanine amidase domain and an endo-β-N-acetylglucosaminidase domain. It undergoes proteolytic processing to generate two extracellular enzymes that are secreted. The specific secretion proteins HlyB and HlyD are 80 kDa and 54 kDa respectively. The process is directed by the hlyB and hlyD genes which are contiguous and co-expressed with the hylC and hylA genes that are required for the synthesis of protoxin and the acyl carrier protein-dependent fatty acylation that matures it to cytolytically active toxin. Hemolysin is secreted as the mature acylated form of the hlyA gene product proHlyA following the covalent attachment of a fatty acid moiety in a cytoplasmic mechanism directed by the dimeric HlyC activator, a putative acyl transferase and dependent upon the acyl carrier protein. This specific and novel HlyC-directed fatty acylation is required to target the hemolysin toxin to mammalian cell membranes prior to forming cation-selective pores and disrupting the host cell.

[0210] Bacteria such as E. coli, Bordetella pertussis, Pasteurella haemolytica, Proteus vulgaris and P. mirabilis produce genetically related toxins. Their activity is dependent on the presence of calcium ions. Characteristically, they have regions of 10 to 47 repeats within the amino acid sequence and termed repeats in toxin or RTX gene family. The repeat sequence contains the following nine amino acids; leucine-X-glycine-glycine-X-glycine-asparagine-aspartic acid-X where X is a variable amino acid. These repeats are required for hemolytic activity. A large hydrophobic region of the hemolysin separate from the repeats, is also essential for activity and may be involved in the interaction with the host cell membrane. The hemolysin A of E. coli apparently form pores on the target cell membrane. This requires a 20 kDa product of another gene HlyC before it becomes actively hemolytic. In E. coli, the operon for the production of the hemolysin contains four genes hlyA which codes for the structural hemolysin and hlyC which is required for activation of the HlyA. The other two genes hlyB and hlyD are involved in the transport of HlyA to the extracellular environment. Pasteurella haemolytica leukotoxin and Bordetella pertussis adenylate cyclase hemolysin have similar C-terminal sequence and associated genes analogous to those in the hly operon. (Koronakis V et al., Secretion of Hemolysin and other Proteins out of the Gram-Negative Bacterial Cell, in Ghuysen J M et al., ed, Bacterial Cell Wall, Elsevier, Amsterdam (1994)).

[0211] The Shiga toxin of Shigella dysenteriae and Shiga-like toxins of E. coli (Verotoxins) are a family of related toxins which have similar amino acid sequences and biological activities. The A subunit of Shiga toxin has a molecular mass of 31 kDa which associates with five to the 7 kDa B subunits. The A subunits is proteolytically cleaved into A1 and A2. It is the A1 fragment which is biologically active. The host cell receptor for Shiga toxin is the glycolipid Gal(α-4)Gal(β1-4) GlcCeramide (globotriosylceramide; Gb3) and for Shiga-like toxin I (SLTI) and SLTII of E. coli is Gal(α-3)GalCeramide (Galabiosylceramide). The binding specificity is dependent on both sugars residues and the lipid moiety. The Shiga toxin is known to inhibit protein synthesis. It is a RNA N-glycosidase enzyme whose site of action is the 60S ribosomal subunit. The toxins remove an adenine base from position 4324 on the aminoacyl -transfer RNA binding site of 28S ribosomal RNA hence preventing peptide length elongation. The effect on protein synthesis is similar to that of diphtheria toxin and Pseudomonas aeruginosa exotoxin A. The SLTI and II toxins of E. coli and encoded by lysogenic phage. Its expression is controlled by iron concentration in the growth medium by way of the fur gene and iron box repressor protein binding site. Clostridia difficile toxins A and B also bind to anomeric galactose epitopes on cell membranes and induce membrane associated enzymes and inhibit G protein activation which results in cell death. Tumor cells transfected with a galactosyltransferase genes to produce the a α-galepitope are susceptible to lysis by both the Shiga-like toxins and C. difficile toxin. The expression of the α-gal epitope is enabled by the transfection of nucleic acids encoding -Gal transferase into tumor cells.

[0212] Listeria monocytogenes produces a hemolysin. listerolysin O (LLO), a member of the thiol-activated family of cytolysins. LLO is encoded by the gene hyl (also designated hylA and lisA). Listerolysin O toxin is a pore forming toxin which degrades the membrane of its phagocytic vacuole allowing the bacterium to escape into the host cytoplasm. This gene cloned into Bacillus subtilis enables the bacterium to grow rapidly intracellularly in the cytoplasm of a macrophage-like cell line after disrupting the phagosomal cell membrane.

[0213] Tumor cells are transfected with the above microbial nucleic acids as in Example 1-3. These transfectants are useful in vivo against established tumor and micrometastatic disease (Examples 5, 15, 16, 18-23).

### 21. Augmentation of Tumor Cell Immunogenicity by Bacterial Products: Transfection with Genes Encoding Bacterial Antigens or Receptors for Bacterial Products

[0214] Tumor cell are provided with augmented antigenicity by expressing fundamental patterns that are recognized by fundamental recognition units of the innate immune response. Examples are LPS's of gram negative organisms, SAgs and peptidoglycans of gram positive organisms, fungal β-glucans, bacterial glycosylceramides, and mycobacterial lipoarabinans. Numerous infectious agents with these structures cause potent immune reactions e.g. streptococcal cellulitis induced by S. pyogenes, E. coli induced sepsis and meningococcal meningitis induced by Neisseria meningitidis.

[0215] The T cell system is far more adept at responding to innate pattern recognition units than to tumor associated antigens. In the present invention, tumor cells are transfected with nucleic acids encoding molecules or biosynthetic enzymes that result in structures which mimic the major immunogenic structures of bacterial antigens. This enables the tumor cells to be recognized more effectively by the T cell system. In addition, tumor cells are provided with receptors for bacterial antigens such as SAgs, LPS's (CD14), and glycosylceramides (CD1). Genes encoding bacterial antigens which produce potent immune responses are transfected into tumor cells to include bacterial membrane and cell wall constituents such as LPS's, peptidoglycans, glycosylceramides, lipoproteins, lipoarabinans and capsular polysaccharides. In addition, nucleic acids encoding the staphylococcal SAgs induce potent T cell lymphoproliferation and TH-1 cytokine production while LPS's are known to have a bystander effect on T cell proliferation The two agents synergize in their capacity to induce lethal endotoxic shock in animals.

[0216] The present invention contemplates that the optimal approach is to present the bacterial immunogen structure (for example streptococcal capsular polysaccharide) sequentially or concomitantly with a bacterial mitogenic signal (SAg). Under certain conditions, these genes are co-transfected with various bacterial invasins, toxins, autolysins and inflammatory enzymes which together with the colonizing properties of tumor metastasis genes produce a tumor cell capable of migrating to metastatic sites where it induces necrotizing cellulitis. Such genes are preferably placed under the control of inducible promoters as described herein. These transfectants are prepared by methods in Example 1-3. They are useful against established tumors or metastatic tumor in vivo as in Example 15, 16, 18-23.

### 21b. Combining Expression of SAg Nucleic Acids with Nucleic Acids Encoding Enzymes that Drive the Synthesis of Bacterial LPS, Galactosylceramide or Capsular Polysaccharide

[0217] In general, this is accomplished by co-transfection of nucleic acids each encoding one of the above products or by transfection with a fusion nucleic acid that encodes the combination SAg-encoding nucleic acid is fused in frame or cotransfected into tumor cells or accessory cells with nucleic acids encoding bacterial LPS's, peptidoglycans, and galactosylceramides. The preferred end products are synthesized in E. coli and N. meningitides (LPS's), Staphylococcus and Streptococcus (peptidoglycans); Sphingomonas paucimobilis (glycosylceramides).

[0218] The synthetic genome or cluster of genes for biosynthesis of these products is incorporated as a whole to include multiple and specific enzymatic transferases and trafficking proteins required for the stepwise synthesis of each of these products. Gene clusters are necessary to provide the requisite transferases for synthesis of these large molecules. For example the genes required for the biosynthesis of type 1 capsular polysaccharide of S. aureus are localized to a 14.6-kb region. Sequencing analysis of the 14.6-kb fragment revealed 13 open reading frames (ORFs). Ten genes are involved in capsule biosynthesis. CapG aligned well with consensus sequence of a family of acetyltransferases from various prokaryotic organisms suggesting that CapG may be an acetyltransferase.

[0219] The structural requirements for endotoxic activity of LPS's are as follows. (1) a b(1-6)-linked D-glucosamine disaccharide backbone; (2) biphosphorylation at positions 1 and 4′ of the disaccharide backbone; (3) a suitable number of 3-acyloxyacyl groups per disaccharide unit; and (4) acyl groups of a suitable length as indicated by Kumazawa et al., and Nakatsuka et al. Transfection with nucleic acid encoding LPS's would require the preservation of the biphosphorylation and the acyl groups between 14 and 23 to maintain optimal activity. Derivatives may contain a monosaccharide group in place of the disaccharide group.

[0220] LPS Structure

[0221] LPS consists of an outer region which is composed of polymerized di- and pentasaccharide repeating units whose compositions vary within a species or strain. The inner region is generally conserved within a single genus, and consists of a core oligosaccharide linked by the sugar 2-kcto-3-deoxy-D-amino-octonate (KDO to a disaccharide backbone with attached long chain fatty acids, the lipid A. This component is responsible for much of the biological activity of the molecule. Components conferring the greatest biological and immunomodulatory activity are now known to be a glucosamine disaccharide, a bis phosphorylated lipid A and acyloxyacyl groups on the fatty acid chain. The loss of only one of these components, for example, a phosphate group reduces the activity of the molecule. LPS's from different genera of bacteria vary in their immunomodulating activity and studies of the structure have shown very subtle differences. For example, Bacteroides is apparently less active in endotoxin activity than LPS from enteric bacteria. This was initially thought to be related to a modification of the of KDO in the core region with an added phosphate group. Other differences in the LPS were found when the fatty acids from E. coli and Bacteroides were compared. E. coli has six fatty acid chains or acyl groups per diglucosamine backbone each with a chain length of 12-14 carbon atoms. Included in the acyl groups is 3-hydroxytetradecanoic acid (3-OH—C14:0)which is absent in the Bacteroides strains. In contrast, Bacteroides has 4-5 fatty acids of chain length 15-17 carbons per diglucosamine and has branched 3-hydroxy fatty acids. Studies of synthetic lipids have confirmed that reduced biological activity relates to fewer fatty acids chains.

[0222] A common feature of LPS's from various species is that they are amphiphiles, with both a hydrophobic part capable of dissolving in lipid membranes and a hydrophilic part which remains in the water phase. Therefore, the first step of molecular interaction is one between the amphiphilic molecule and the mammalian cell surface either by ionic binding, hydrogen bonding or hydrophobic interaction. The bacterial molecule may be inserted into the mammalian membrane by its hydrophobic moiety or attached to membrane receptors with the hydrophilic moiety, or through charge effects or via binding to host glycoproteins and glycolipids resulting in signal transduction. Most of the immunomodulating activity of these bacterial molecules is indirect and stems from the release of host mediators. Cytokines such as IL-1, tumor necrosis factor, and IL-6 are involved. The LPS binding protein attaches to gram-negative bacteria or free LPS and mediates the attachment to macrophage membrane receptor known as CD14. The recognition of the CD14 only recognizes LPB when it is bound to LPS. The LPS-LPB complex may directly trigger TNF release or hold the complex at the cell surface so that other hosts cell surface molecules trigger TNF release. LPBs also act as opsonins. Another area where sugar residues play an important role is in cell surface glycoprotein interactions which involve protein-carbohydrate recognition. In the recirculation of and recruitment of leukocytes in the body, the carbohydrate-recognizing protein domains of glycoproteins of one cells bind specifically to the oligosaccharides of glycoconjugates on another type of cell. These recognition events control the movement of bloodborne lymphocytes into lymphoid organs. Specific recognition occurs between lymphocytes and specialized cells in the wall of blood vessels known as high endothelial venules.

[0223] Genes Encoding Lipid A Biosynthesis

[0224] LPS is generally synthesized as two separate components, the lipid A/core and the O polysaccharide, which are then ligated to give the complete LPS molecule. Three genes encode enzymes that catalyze the steps of lipid A synthesis (lpxA, lpxD and lpx B for steps 1,3 and 5) and fabZ and envA. More specifically, the enzymes that catalyze the synthesis of lipid A are thought to act in the following sequence (indicating the genes): lpx A, lpx C, lpx D, lpxB. The reactions catalyzed by the products of these genes are given in Table 1 of Schnaitman C A et al., Microbiol. Rev. 57: 655-682 (1993).

[0225] Blocks of Genes Involved in LPS Biosynthesis

[0226] Blocks of genes involving LPS synthesis have been sequenced and analyzed. The lipid A biosynthetic pathway has been elucidated. Four of the genes in this pathway have now been identified. Three of them are located in a complete operon which also contains genes involved in DNA and phospholipid synthesis. Genes involved in synthesis of the LPS lipid A core and their activity at various points in the biosynthetic pathway are described in Schnaitman C A et al., Microbiological, Reviews 57: 655-682 (1993) which is incorporated by reference. Therefore, it is likely that LPS biosynthetic enzymes are organized into clusters on the inner surface of the cytoplasmic membrane around a few key membrane proteins.

[0227] A cluster of assembly genes produced by various bacteria encode LPS with homologous structures. These genes have been transfected into E. coli and they induce identifiable LPS's. There are also smooth and rough LPS's which have a hierarchy of potency in terms of procoagulant activity and activation of TNF. Mutants produced which synthesized progressively less polysaccharide attached to the lipid A moiety. The presence of long chain polysaccharides attached to the lipid moiety decreased the ability to activate TNF. Rough bacteria were more effective than smooth bacteria, in inducing TNF production. Fatty acids of various chain lengths can be produced including those that resemble monogalactosylceramides. Transferases for biosynthesis of galactan the LPS structure of the O antigen from Klebsiella pneumoniae have been identified as well as genes controlling the O antigen chain length.

[0228] The genes for LPS and glycosylceramide assembly also involve multiple transferases. The transfection of tumor cells involves 10 genes encoding a particular stretch of the bacterial genome. In E. coli, the 14-kilobase pair chromosomal region located between waaC (formerly rfaC) and waaA (kdtA) contains genes encoding enzymes required for the synthesis and of the type R2 core oligosaccharide in the lumen of the endoplasmic reticulum. This occurs in a stepwise fashion.

[0229] The gene encoding the Haemophilus influenzae type B outer membrane protein functions as a porin and is useful in protective immunity has been cloned as a 10-kilobase Hib DNA insert and expressed in E. coli. The biosynthesis of LPS's involves genes encoding the key transferases including rfal. The N. meningitides highly conserved surface protein conferring protection is encoded by a ORF of 525 nucleotides.

[0230] Genes Encoding Enzymes the Catalyze Core Biosynthesis

[0231] The rfa cluster includes the genes for all transferases for assembly of core. It includes three operons consists of at least 17 genes. The majority of known genes whose functions are involved exclusively in LPS core biosynthesis are located in the rfa cluster [Pradel E et al., J. Bacteriology 174: 4736-4745 (1992)]. It includes three operons. However, there are also genes such as kdsA and rfaE located outside the rfa cluster which are involved in biosynthesis of sugars unique to the core or exert direct effect on core structure. These clusters appear to have originated by the exchange of blocks of genes among ancestral organisms. There are few which code for the integral membrane proteins. The promoter for the rfa genes has been identified. Mutations have been identified known a rough mutants traced to three loci namely rfa, rfb and rfc.

[0232] The region of the E. coli chromosome encoding enzymes responsible for the synthesis of the LPS core has been cloned. This region formerly known as the rfa locus comprises 18 kb of DNA between the markers tdh and rpmBG. The genes are arranged in three different operons and the genetic organization of this locus seems to be identical in E. coli K-12 and S typhimurium.

[0233] Linkage of LPS Transcription and Toxin Secretion

[0234] In E. coli and Salmonella, a link has been found between toxin secretion and the gene regulating

[0235] LPS transcription. Toxin secretion is regulated by gene expression within the hlyCABD operon. A recently identified activator of hlyCABD gene expression is the 128-kDa product of the rfaH (sfrB) gene which positively regulates transcript initiation and possibly termination in the operons encoding synthesis of LPS of E. coli and Salmonella. The discovery of a role in hlyCABD expression for the LPS (rfa) operon transcriptional activator rfaH is consistent with the role of LPS in influencing both the secretion and toxic activity of the toxin.

[0236] Genes Encoding Enzymes that Synthesize Polysaccharide Capsule and Membrane Proteins

[0237] Genes for the biosynthesis of a polysaccharide capsule are induced in Sphingomonas by overlapping DNA segments which span about 50 kbp restored the synthesis of sphingan. The polysaccharide components of LPS from B. Pertussis, H. influenzae and Bacteroides spp. will activate B-cells. The polysaccharide of Bacteroides activates B cells indirectly by first triggering the macrophage whereas the lipid A moiety triggers the B cells directly. Therefore different parts of the same molecule interact with different types of host cells. There is also evidence that immunopotentiating activity of a glycopeptide produced by mycobacteria is dependent on the saccharide residues of the molecule.

[0238] The capsular polysaccharide of the Streptococcus is extremely immunogenic, consisting of glycan strands composed of regularly alternating

[0239] N-acetylglucosamine and N-acetylmuramic acid residues joined through β-1,4 glycosidic linkages and attached to crosslinked peptides by amide bonds. The capsule of strain M is composed of taurine-2-acetamido-2-deoxyfucose and 2acetamido-2-deoxy-D-galacturonic acid. The gene for this structure called cap-1 has been cloned and is used to transfect tumor cells. The nucleic acid sequences appear in Lin et al., J. Bacteriol. 176, 7005-7016 (1994).

[0240] A new 24-kDa group A streptococcal membrane protein known as streptococcal protective antigen (Spa) has been identified and is distinct from the surface M protein which evokes protective opsonizing antibodies. The Spa-encoding gene has been cloned and consists of a 636-bp 5′ fragment. (Dale, J B et al., J. Clin. Invest. 103: 1261-67 (1999)).

[0241] The present invention contemplates the use for cancer treatment of these and other bacterial antigens from staphylococci, streptococci, E. coli, N. meningitides, and other genera which antigens evoke an immune response in mammals. In the preferred approach, a nucleic acid encoding such an antigenic structure is transfected and expressed in tumor cells. Methods of preparation, use and assessment of these therapeutic constructs in tumor bearing hosts are in Example 1, 2, 18-23.

[0242] SAg nucleic acids are fused in frame or cotransfected into tumor cells or accessory cells with nucleic acids encoding key transferases (gene clusters) and glycosylation sites encoding capsular membrane from Streptococcus or Neisseria meningitides lipoprotein-LPS-phospholipid and cell wall peptidoglycans, i.e., N-acetylglucosamine (NAG) and N-acetylmuramic acid (NAM).

[0243] SAg DNA is fused in frame to DNA encoding a highly conserved outer membrane surface protein of N. meningitides known as Nspa. The Nspa gene has been cloned (Martin, D. et al., J. Exp. Med. 185: 1173-1183 (1997)). The LPS produced would be of weak to intermediate strength such as that produced by Listeria or Legionella.

[0244] Borrelia burgdorfi is the causative agent of Lyme disease. The osp genes are located at a single genetic locus on a 49 kb double-stranded DNA linear plasmid where they are organized as an operon ospAB. The amino acid sequences of OspA and OspB show a high degree of similarity and resemble prokaryotic lipoproteins. Nucleic acids encoding the ospA and ospB lipoproteins are cotransfected into tumor cells together with SAgs.

[0245] Genes Encoding Membrane Glycosylceramide Biosynthesis

[0246] Nucleic acids encoding the synthesis of the GalCer from Sphingomonas paucimobilis are transfected into tumor cells, resulting in the synthesis of GalCer by the tumor cell. (Kawahara K et al., FEBS Letters 292: 107-110, (1991) Yamazaki M et al., J. Bacteriology 178: 2676-2687 (1996) Natori T et al., Tetrahed Lett 34:5591-5592 (1993) Costantino V et al., Liebigs Ann. Chem. 96: 1471-1475 (1995)). Nucleic acids encoding enzymes responsible for synthesis of Neiseria meningitides LPS are transfected into tumor cells, resulting in the synthesis of LPS by the tumor cell (Steeghs L et al., Gene 190: 263-270 (1997)). These nucleic acids encoding key transferases are fused to nucleic acids encoding amplified oncogenes or transcription factors such as Bc1-2, c-myc, K ras, bcr, c-abl or NF-κB.

[0247] Genes Involved in Mycobacterial Cell Wall Biosynthesis

[0248] SAg-encoding nucleic acid is fused in frame or cotransfected into tumor cell with nucleic acids encoding the key enzymes involved in the biosynthesis of mycobacterial cell wall mycolic acid, phosphatidylinositol mannosides and lipoarabinans. A high affinity interaction of CD1b molecules with the acyl side chains of known T cell antigens such as lipoarabinomannan, phosphatidylinositol mannoside and monomycolate has been demonstrated. Hence the nucleic acid encoding the CD1 receptor are cotransfected into tumor cells together with SAg-encoding nucleic acid and nucleic acids encoding the multifunctional fatty acid and mycocerosic acid synthases involved in the biosynthesis of mycolic acid and methyl-branched fatty acids.

[0249] The multifunctional genes for mycocerosic acid synthase involved in the biosynthesis of these molecules have been isolated. In addition to the usual fatty acids found in membrane lipids, mycobacteria have a wide variety of very long-chain saturated (C18-C32) and monounsaturated (up to C26) n-fatty acids. The occurrence of α-alkyl β-hydroxy very long chain fatty acids i.e., mycolic acid is a hallmark of mycobacteria and related species. Mycobacterial mycolic acids are the largest (C70-C90) with the largest-branch (C20-C25). The main chain contains one or two double bonds, cyclopropane rings, epoxy groups, methoxy groups, keto groups or methyl branches. Such acid are the major components of the cell wall, occurring mostly esterified in clusters of four on the terminal hexa-arabinofuranosyl units of the major cell wall polysaccharides called arabinogalactans. They are also found esterified to the 6 and 6′ positions of trehalose to form “cord factor”. Small amounts of mycolate are also found esterified to glycerol or sugars such as trehalose, glucose and fructose depending on the sugars present in the culture medium. Mycobacterium also contains several methyl-branched fatty acids. These include 10-methyl C18 fatty acid (tuberculostearic acid found esterified in phosphatidyl inositide mannosides), 2,4-dimethyl C14 acid and mono-, di- and trimethyl-branched C14 to C25 fatty acids found in trehalose-containing lipo-oligosaccharides, trimethyl unsaturated C27 acid (phthienoic acid), tetra-methyl-branched C28-C32 fatty acids (mycocerosic acids) and shorter homologues found in phenolic glycolipids and phthiocerol esters and multiple-methyl-branched phthilceranic acids such as heptamethyl-branched C37 acid and oxygenated multiple methyl-branched acids such as 17-hydroxy-2,4,6,8,10,12,14,16,-octamethyl C40 acid found in sulfolipids.

[0250] Genes Involved in Mycolic Acid Biosynthesis

[0251] The biosynthesis of mycolic acids involves fatty acid chain elongation, desaturation, cyclopropanation of the olefin and a Claissen-type condensation. The genes involved in cyclopropanation are cma1, cma2. The methoxymycolate series found in M. tuberculosis contains a methoxy group adjacent to the methyl branch, in addition to the cyclopropane in the proximal position. A series of four methyl transferase genes was cloned. The mm4 methylates the distal olefin.

[0252] The multifunctional fatty acid synthase (FAS) (type 1) catalyses not only the synthesis of C16 and C18 fatty acids but also elongation to produces C24 and C25 fatty acids. Cloning and sequencing of the synthase gene revealed a 8389 bp ORF. The domain organization is much like a head to tail fusion of the two yeast FAS subunits; acyl transferase (AT)-enoyl reductase (ER)-dehydratase (DH)-malonyl/palmitoyl transferase-acyl carrier protein (ACP) fused with β-ketoreductase (KR)-β-ketoacyl synthase (KS).

[0253] The MAS gene encoding mycobacterial mycocerosic acid synthase is a dimer of the FAS gene. The cloning and sequencing of the MAS gene revealed the domain organization in the following order: KS-AT-DH-ER- KR-ACP. The purified MAS shows a preference for elongation by four methylmalonyl CoA units reflecting the natural composition of mycocerosic acids. FAS and MAS are also involved in the biosynthesis of phthiocerol and phenolphthiocerol which involve elongation of preformed n-C20 fatty acyl chains or an acyl chain containing a phenol residue at the w-end. The cluster of five genes, ppsi1-5 encode the multifunctional enzymes (Fernandes N D et al., Gene 170: 95-99 (1996) Mathur M et al., J. Biol. Chem. 267:19388-19395 (1992) Yuan Y. et al., Proc. Natl Acad. Sci. USA 92: 6630-6634 (1995)).

[0254] Tumor cells are cotransfected with SAg-encoding DNA and nucleic acids encoding the biosynthesis the above microbial products. The transfected tumor cells acquire significant additional immunogenicity. These cells are prepared as in Example 1-3. They are useful in vivo as a preventative or therapeutic antitumor vaccine (Examples 5, 15, 16 18-23. They are also useful ex vivo to immunize T, γ/δT cells, NK or NKT cells to produce a population of effector T or NKT cells for adoptive immunotherapy of cancer (Examples 2-5. 15, 16, 18-23, 68).

### 22. SAg-Ganglioside or SAg-Galactosylceramide Complexes Formed after Transfection of Tumor Cells with DNA Encoding SAgs: Complete Bacterial Antigen System Recognized by CD1 Receptors Capable of Inducing Anti-Tumor Effects

[0255] SAg-encoding nucleic acid transfected into tumor cells express SAg on the tumor cell surface which is bound to cell surface gangliosides which are tumor associated antigens, oncogene product such as EGF or IGF. In this way the tumor associated antigen is capable of recognition and interaction with host T cells and macrophages and of evoking a potent immune response. The SAg is also bound or associated with the CD1 receptor alone or associated with the glycosphingolipid tumor associated antigen.

[0256] SAgs have a natural affinity for glycosphingolipids on cell membranes. Enterotoxin-producing-bacteria secrete enterotoxins which in their precursor state are bound to cell membranes in dimeric form. Enterotoxin transfected tumor cells induce an anti-tumor response by expressing the tumor cell surface antigen in association with the SAg. Bound to the tumor cell membrane, the SAg may be in dimeric form associated with the ceramide lipophilic anchor domain of a glycosphingolipid tumor associated antigen. Likewise, the SAg may be associated with the carbohydrate moiety or the ganglioside which protrudes from the cell surface. It may also be secreted in monomeric or dimeric form fused to membrane associated tumor antigen, oncogene product or receptor. If the tumor associated glycosylceramide, glycoprotein antigens, or glycolipid antigen with or without SAg are presented on CD1 receptors, then NKT cells may generate the predominant T cell response. However the classical T cell system is also responsive.

[0257] These constructs are produced and used as a vaccine against established tumor by protocols given in Examples 2-5, 15, 16, 18-23.

### 23. Nucleic Acids Encoding CD1 Receptors

[0258] Nucleic acid encoding the CD1 receptor is transfected into tumor cells, resulting in expression of the CD1 receptor on the tumor cell surface. Promoters of CD1 synthesis are also useful in this invention. The human genome includes five CD1 genes (A-D)which also function in antigen presentation to T cells (Calabi, F et al., CD1: From Structure to Function in Immunogenetics of the Major Histocompatibility Complex, Srivastava, R et al., eds, VCH publishers, New York, N.Y., 1991). In mice, two homologous proteins (mCD1.1 and 1.2) have been characterized and map to chromosome 3. The human CD1 genes are located on chromosome 1q221-q23 in the order D-A-C-E from the centromere on a 190 kb segment of DNA. With the exception of CD1B, they are all in the same transcriptional orientation. They are evenly spaced in the complex with one exception: CD1D and CD1A are spaced two to three times farther apart than the average. The products of CD1A, -B and -C genes have been defined serologically. The products of CD1D and CD1E are unknown. They share a highly conserved exon domain which is homologous to the β2m-binding domain (α3) of MHC class I antigens. The CD1 molecules are not polymorphic and apart from CD1D, are noncovalently associated with β2m in a TAP-independent manner. Complex alternative splicing of CD1 genes results in tissue specific forms of the protein, which can be intracellular, membrane bound, or secreted. In cells infected with mycobacteria, the CD1 molecule binds and presents a mycobacterial membrane component, mycolic acid. Surface CD1 molecules present longer peptides than those normally found on class I molecules. Whether CD1 molecules can also present peptide antigens is still unclear although this has been shown for at least one member of the CD1 family.

[0259] Tumor cells are transfected with nucleic acid encoding the CD1 receptor. Nucleic acid encoding cell wall or cell membrane associated glycosylceramides or a branched, b hydroxy long-chain fatty acids found in mycobacteria and other bacteria are cotransfected into the CD1 transfected tumor cells. The tumor cell therefore displays glycosylceramides bound to the CD1 receptor.

[0260] Using site directed mutagenesis, DNA encoding the CD1 receptor is provided along with DNA encoding a SAg binding site. This SAg binding site consists of key amino acids from the SAg receptor or from the SAg binding sites on (i) MHC class II chains or (ii) the TCR Vβ region. This may consist of a glycosphingolipid sequence (sensitive to endoglycoceramidase) present on some mammalian cells.

[0261] The glycosylceramide used to bind to the CD1 receptor will have an exposed SAg binding site which is sensitive to endoglycoceramidase, an enzyme from Rhodococcus which specifically cleaves the glycosyl moiety from glycosphingolipids. Other ceramidases break up sphingolipid into fatty acids and sphingosine.

[0262] These tumor cells transfectants are prepared as in Examples 1 and 2. They are used in vivo as a preventative or therapeutic antitumor vaccine as in Example 14-16, 18-23. They are also useful ex vivo to produce a population of tumor specific T, γ/βT, NK or NKT cells for adoptive immunotherapy of cancer (Example 2-5, 7, 15, 16, 18-23, 68).

### 24. DNA Encoding Streptococcal M Proteins and DNA Encoding Protein A or its Fc and VH₃ IgG binding Domains Transfected into Tumor Cells Alone or SAg DNA

[0263] The streptococcal M proteins are type-specific and act as protective or virulence factors. M protein genes are members of a larger emm-like gene family, such that many S. pyogenes strains express more than one M-like protein. DNA encoding the streptococcal M protein and DNA of the larger emm-like family are transfected into tumor cells (Kehoe M. A., “Cell-Wall Associated Proteins in Gram-Positive Bacteria,” In: Bacterial Cell Wall, Ghuysen J M et al., eds, Elsevier, Amsterdam, 1994).

[0264] In addition, DNA encoding protein A and its domains as well as DNA of the streptococcal fcrΛ76 gene located upstream of the emm-like gene are transfected into tumor cells individually or together to cause the expression of IgG FcR- and VH3 IgG-binding domains (Kehoe Mass., supra). DNA encoding SAg is cotransfected into the same tumor cells to produce a tumor cell expressing any combination of M protein, protein A and a SAg.

[0265] Such cells are used in vivo as preventive vaccines or as therapeutic vaccines against established tumors. See Examples 1-5, 11, 15, 16, 18-23. They may also be used ex vivo to induce populations of active tumor specific effector T cells (including αβ+ T cells, γ/δ T cells, NK cells and NKT cells) that are then used in adoptive immunotherapy See Examples 2-5, 7, 15-16, 18-23, 25, 68.

[0266] Nucleic Acids, Bacterial Cells and Phage Displays Mimicking SAgs

[0267] Because of circulating naturally occurring antibodies in humans, native or mutated SAgs that are administered parenterally are not likely to reach the appropriate receptors on T cells or tumor cells. To solve this problem, mimic oligonucleotides are prepared which mimic SAgs in their capacity to bind SAg receptors. Since no natural antibodies are directed to these compositions, they will not be prevented from reaching specific SAg receptors in vivo.

[0268] SAg receptors are used to screen oligonucleotides for their ability to mimic SAg binding. Useful receptors for such screening include those described herein (as expressed on tumor cells) and T cell TCR V chains. For example, pools of oligonucleotides are tested for their binding to, and affinity for, immobilized SAg receptors using nucleotide chromatography technology well known in the art. Once these high affinity binding oligonucleotides are identified, they are isolated (or, following sequencing, may be synthesized) and administered to a host.

[0269] Also included here is a bifunctional oligonucleotide-peptide chimeric molecule that binds specifically to the SAg receptor on tumor cells as well as the Vβ region of the TCR. Such an oligonucleotide will bind simultaneously to tumor cells and T cells (in the process of activation) to produce an anti-tumor response. An oligonucleotide-protein construct is prepared consisting of (a) a peptide sequence of enterotoxin A that binds to the TCR and (b) an oligonucleotide that binds to SAg receptor on tumor cells. The peptide portion of this construct should be devoid of MHC class II binding sites in order to minimize undesired binding of the molecule to class II structures upon administration in vivo.

[0270] In another embodiment, the nucleic acid portion of the chimeric molecule binds to the TCR while the peptide consists of a non-enterotoxin ligand that is specific for the SAg receptor on tumor cells. This construct has the advantage of lacking any binding site for natural antibodies. Yet another additional chimeric molecule consists of an oligonucleotide portion specific for the class II α or β chain and a second oligonucleotide or a peptide specific for the TCR Vβ chain.

[0271] Methods for preparing these constructs are given in Examples 5, 13. These constructs are especially useful for targeting tumors in vivo while also promoting a T cell anti-tumor response. See Examples 18-23. However, these chimeric molecules may also be used ex vivo in the production of tumor specific effector T cells capable of inducing, or effecting, an anti-tumor response when administered to a tumor bearing host. See protocols in Examples 2-5, 15, 16 18-23, 68.

[0272] SAg and GlycosylCeramide Co-Expression

[0273] This may be accomplished using intact bacteria or phage display approaches. Since the precursors and substrates of the glycosyltransferases are not readily available in most mammalian cells, it is more convenient to induce dual expression of GalCer and SAgs in bacteria, for example Sphingomonas paucimobilis, which naturally produce GalCer. Hence, nucleic acid encoding a SAg is transfected into this bacterium together with a suitable promoter well known in the art. The bacterium produces both GalCer and SAg.

[0274] By ensuring that the SAg contains one or more glycosylation sites (by using the appropriate nucleic acid sequence), a glycosylated SAg is produced. Such a SAg binds to the glycosyl-ceramide, e.g., GalCer to form a conjugate that is expressed on the bacterial surface of is secreted. In either form, such a SAg-GalCer conjugate can sensitize NKT cells to produce an anti-tumor response.

[0275] In addition, phage or plasmids encoding the appropriate transferase are transfected into low virulence Staphylococcus species which also produce enterotoxins. The bacterium acquires the capability of expressing GalCer on its surface. These bacterial constructs and compositions are used in vivo in a tumor bearing host to produce an anti-tumor response in protocols given in Examples 5, 13, 15, 16 18-23 and Detailed Description Section 19. They are also are used ex vivo to activate NKT cells or T cells to differentiate to tumor specific effector cells for use in adoptive immunotherapy of cancer by protocols in Example 1, 2, 14-16, 18-23).

[0276] Phage display technology is used to target selected SAg sequences to targets in vivo. The selected peptide is used as a binding sequences in lieu of the full-length polypeptide. This permits elimination from the construct of the antigenic portion of the SAg to which natural antibodies are directed. Cloned genes are expressed as part of phage coat proteins, for example, as fusions with the gene III protein (gIIIp) or the gene vIII protein (gVIIIp). In addition to the displayed gene product, the phage genome (of each particle) includes the gene encoding this product.

[0277] Phage display is preferably done using the filamentous phage f88-4 and comprises forming a fusion that results in the C terminus of the “selected” (i.e., inserted gene's) product and the N terminus of the phage protein gVIIp. Peptides of various enterotoxins are expressed in the phage display—most preferably peptides that bind to the SAg receptor on colon carcinoma cells. These peptides retain their capacity to bind to the TCR and to activate T cells. Also contemplated within this invention is phage display of SAg plus nucleic acid encoding synthesis of GalCer and/or the α-Gal epitope. DNA for synthesis of GalCer is preferably isolated from Sphingomonas paucimobilis; DNA; encoding the galactosyl transferase for synthesis of α-Gal is preferably isolated from Klebsiella aerobacter, Serratia, E. coli and Salmonella organisms which naturally produce and express these epitopes. The phage displays are administered in vivo and are capable of initiating a potent immune response to the tumor using the protocols described in Examples 5 and 13 and Section 19, above. These preparations are also useful for activating T cells or NKT cells ex vivo to produce a tumor specific effector cells for use in adoptive immunotherapy (Examples 2-5, 14-16, 18-23).

[0278] Viral infection of a host cell having the galactosyl transferase results in the shedding of virions that express the α-Gal epitope. When a host mammalian cell has been transfected with nucleic acid encoding SAg, the virus can coexpress the Gal epitope and the SAg on its surface. Such a viral construct is administered in vivo to achieve a therapeutic effect, or, in another embodiment, is employed ex vivo to produce tumor specific effector T or NKT cells for use in adoptive immunotherapy of cancer (Examples 2, 3, 7, 15, 16, 18-23).

### 26. Combining SAgs with Enterotoxin Precursors (Cell-bound Dimers and Oligomers) and with Enterotoxin Promoters and Transcriptional Regulatory Genes

[0279] Cell-bound SAg Dimers and Oligomers

[0280] Staphylococcal enterotoxins are present in the membrane of enterotoxin producing bacteria in dimeric form and retain potent enterotoxin-like activity when isolated from the membrane. It is in this membrane-bound form that enterotoxins are combined with tumor associated antigens or oncogene products and presented to the T cell system. The dimerization of the enterotoxins may promote clustering for more effective presentation to T cells. Indeed, dimerization or polymerization of enterotoxins or the introduction of tandem repeats of the SAg binding sites for TCR and MHC class II may be achieved by (1) site directed mutagenesis of the enterotoxin plasmid and (2) introduction of sequences for gene amplification, tandem repetition and/or recombination or by (3) introduction of enzymes for peptide chain elongation. The duplication may be at the level of the bacterial operon including its transcriptional regulators, using methods well described in the art.

[0281] Modified plasmid is DNA is introduced into the target tumor cells or into accessory cells, either or both of which are useful in vivo as a preventative or therapeutic vaccine (Examples 1, 2, 15, 16, 18-23). Such genetically transformed cells may also be used ex vivo to produce effector T or NKT cells for adoptive immunotherapy (Examples 1, 2, 7, 15, 16, 18-23).

[0282] SAg agr locus (Accessory Gene Regulator) and other Bacterial Genes and Elements

[0283] At least 15 gene coding for potential virulence factors in S. aureus are regulated by a putative multicomponent signal transduction system encoded by the agr/hld locus. The synthesis of at least 14 exotoxins and enzymes in S. aureus is regulated by a set of trans-acting elements from agr. The agr gene coordinately controls the expression of exfoliatin toxin, toxic shock syndrome toxin, a, b, d toxins, enterotoxin B, lipases and nucleases (Balaban, N. et al., Proc. Natl. Acad. Sci. USA. 92:1619-1623 (1995)). These proteins are members of the histidine protein kinase family of regulators and control a number of virulence determinants (Balaban supra, Novick R P, Meth Enzymol. 204: 587-637 (1991)).

[0284] Compared to wild-type, agr and hld mutants have decreased synthesis of extracellular toxins and enzymes (such as α-,β-, and γ-hemolysins, leucocidin lipase, hyaluronate lyase and proteases) while having increased synthesis of coagulase and protein A. The agr gene consists of two divergent transcriptional units driven by promoters named P2 and P3. The P2 transcript includes four open reading frames referred to as agrA, B, C, and D, all four of which are required to for the agr response.

[0285] The peptides predicted for agrA and agrC resemble the response regulators and signal transducers of the two-component bacterial signal transduction systems. The primary function of thee four genes discussed above is to activate two promoters; the P3 transcript, RNAIII, however is the actual effector of the exotoxin response. RNAIII activates transcription of secretory protein genes and represses transcriptions of surface protein genes. As a global regulatory system, agr, controls the post-exponential production of exoproteins such as toxins, hemolysins, and exoenzymes. agr is a complex polycistronic locus that encodes a two-component signal transduction pathway that activates transcription of a regulatory RNA molecule that in turn activates transcription of the exoprotein genes.

[0286] Thus, transcriptional regulation of the enterotoxin B gene as well as SED, SEC and staphylococcal capsular polysaccharide gene involves the agr product. (agr does not regulate SEA expression).

[0287] The promoter region of SEA is localized by primer extension analysis. The 5′-end of SEA mRNA is localized 86 bp upstream of the translational initiation codon. A DNA region with good agreement with canonical promoter sequences was observed beginning 8 base pairs upstream of the apparent transcriptional start site. No DNA upstream of the 35 bp region is required for transcription. Both the agr gene and the SEA promoter have been cloned (Peng, H. L. et al., J. Bacteriol. 170:4365-4372 (1988); Borst, D. W. et al., Infec. Immun. 61:5421-5425 (1993)). The xpr locus and the agr locus interact at the genotypic level; agr is autoinduced by a proteinaceous factor produced and secreted by the bacteria and is inhibited by a peptide from an exotoxin-deficient S. aureus mutant strain. The inhibitor, RIP, competes with the activator, RAP. When given as a vaccine, RIP may prove useful as a direct inhibitor of virulence.

[0288] A chromosomal locus (sar) distinct from agr, encodes a DNA-binding protein that is important in regulation, and is required for expression of S. aureus exoproteins including enterotoxin, toxic shock syndrome toxin, hemolysin and staphylokinase. Transcription of Protein A is suppressed by sar and agr.

[0289] A list of plasmids containing bacterial virulence factors useful in this invention is disclosed in Table 49, p. 223 of Patrick, S. et al., Immunological and Molecular Aspects of Bacterial Virulence, John Wiley and Son, New York, N.Y. 1995.

[0290] This invention contemplates the use of the Staphylococcal enterotoxin promoters and transcription factors that activate the enterotoxin biosynthetic cycle. Several Staphylococcal promoters have been identified (Novick, supra). This invention also contemplates the use of the peptide activator RAP which induces agr as well as the peptide inhibitor RIP which induces or represses RNA III.

[0291] SAg-encoding nucleic acid is fused in-frame with Staphylococcus agr nucleic acid and introduced into tumor cells or accessory cells (or the two are cotransfected into these cells). In another embodiment, SAg-encoding nucleic acids placed under the control of an enterotoxin promoter, and this construct is introduced into tumor cells or accessory cells. The agr gene is especially useful because it can be linked to an inducible promoter such as that for corticosteroids or the metallothionein promoter, allowing it to be activated in a controlled manner by exogenous administration of the inducing to the host.

[0292] Methods for introducing the above genes into tumor cells are described in Example 1, 2, 11. The use of such cells in vivo as preventative or therapeutic vaccines are discussed in Examples 15, 16, 18-23. Use of these genetically transformed tumor cells ex vivo to induce effector T, γ/δT, NK or NKT cells for adoptive immunotherapy is described in Examples 2, 3, 7, 15, 16, 18-23, 68.

### 27. Combining SAg with Oncogenes, Protooncogenes, Amplified Oncogenes, Transcription Factors or Tumor Markers

[0293] In one embodiment, the nucleic acid encoding a SAg is fused in-frame to oncogene or protooncogene nucleic acid in tumor cells or accessory cells to produce a chimeric nucleic acid which is expressed in, or on the surface of, the cell. This fused gene may be rendered inducible by judicious choice of a promoter or other regulatory sequence. Preferably, such an inducible promoter is induced by a hormone or a metal. A regulatory element, such as one activated by interferon or a cytokine (e.g., Jak or a STAT), may be included in this construct.

[0294] In another embodiment, the nucleic acid encoding SAg is fused in frame to nucleic acid encoding an oncogene which can be amplified markedly. The fused construct is introduced into tumor cells or accessory cells. An amplified “unit” is initially much larger than the size of the actual gene of importance to the oncogenic event(s) (Hellems, R E, Gene Amplification in Mammalian Cells, Marcel Dekker, New York, N.Y. ). Thus a silent gene is co-amplified with one or more genes expressed on an amplicon. This is a preferred site for the inserting gene clusters wherein one gene encodes a SAg, others encode the enzymes of LPS lipid A biosynthesis, optionally together with their native promoters or operons.

[0295] Transcription Factors and Amplified Oncogenes

[0296] Oncogenes are frequently amplified in human tumors and cultured cancer cells. This is more characteristic of solid tumors and relatively rare in lymphoid malignancies. DNA amplification was first observed cytogenetically a double minute chromosomes (DMs) or homogeneously staining regions (HSRs) but today, direct DNA analysis (Southern blotting) or molecular cytogenetic methodologies, such as fluorescence in situ hybridization (FISH) and comparative genomic hybridization (CGH) can be applied. DMs are episomal forms of amplified DNA that generally lack centromeres and are unequally distributed between daughter cells at mitosis. They appear as isodiametric extrachromosomal bodies stainable with all chromatin dyes. HSRs are chromosomally integrated forms of amplified DNA. They represent either the replacement of the normal chromosome banding pattern with an extended region of homogenous staining or the insertion of such a region into an otherwise normally banded chromosome. DMs and HSRs tend to be mutually exclusive and are potentially interchangeable manifestations of the amplified DNA. Thus, DMs can potentially integrate into distant chromosomal sites to generate heritable HSR. Of 22 human tumors analyzed, 91% contained DMs only, 6.5% contained HSRs and 2.5% contained both. In solid tumors of epithelial origin, DMs and HSR were found in 40% of breast carcinomas, 17% of non small cell carcinoma of the lung, 18% of stomach and esophageal cancers and 15% of uterine carcinomas.

[0297] The overwhelming majority of oncogene amplifications in human tumors affect the Myc oncogene family. In small cell lung cancers all three members of the Myc family, c-myc, N-myc and L-myc can be involved. Myc amplification is associated with a more invasive and more metastatic phenotype. N-myc amplification is seen in neuroblastoma and is associated with the late stages and poor prognosis. The amplification units on chromosome 11q13 are seen in (a) breast cancer, (b) squamous cell carcinoma of the head and neck, lung, and esophagus and (c) bladder tumors. The amplification extends for over 1.5 megabase pairs of DNA and includes two bona fide oncogenes: FGF3 and FGF4. It also includes the Bc1-1 CCND1 (cyclin D1) as well as the EMS 1l gene that encodes the human homologue of cortactin. CCND1 has a critical role in amplified DNA since its expression is increased as a consequence of amplification. The other major targets for amplification are the genes encoding the EGF receptor (ErbB1/Her1) and the related ErbB2/Her2. Both genes are amplified in breast cancer and other malignancies. ErbB2 is associated with estrogen receptor-negative breast cancers and poor prognosis.

[0298] Members of the myc gene family are activated in several human tumors as a result of DNA rearrangements through chromosomal translocations or gene amplification. When overexpressed, all myc genes complement mutant c-ras oncogenes in the transformation of primary rat embryonic cells and transform Rat 1-A cells without assistance of other oncogenes. Stimulation of cellular myc expression levels or changes in post-translational modification of myc proteins have been following exposure of cells to many growth promoting stimuli. These features suggest that the myc proteins participate in the final steps of mitogenic signal transduction. The myc proteins act as transcription factors involved in activation and/or repression of target genes. In neuroblastoma, a group whose tumors are generally near diploid or tetraploid with chromosome 1p deletion(LOH) and N-myc amplification have a generally poor response to treatment and a poor prognosis. Genomic amplification of the N-myc cellular oncogene is present in approximately 40% of cases of childhood neuroblastoma and correlates with histopathological signs of advanced disease. This genomic N-myc amplification appears to be associated with tumor progression rather than tumor initiation since early stage tumors rarely exhibit M-myc genomic amplification. Similarly the c-myc family of protooncogenes including N-myc and L-myc are amplified in small cell carcinoma of the lung.

[0299] The amplified oncogenes useful in the present invention include genes encoding transcription factors. The preferred nucleic acids for use in the present invention are c-myc, N-myc, c-abl, c-myb, c-crb, c-Ki-ras, N-ras. N-myc (amplified 5-1000

[0300] fold in neuroblastoma) is preferred. SAg-encoding nucleic acid is cotransfected into tumor cells or accessory cells with amplified oncogenes. The N-myc and L-myc genes have been cloned as c-myc homologous amplified oncogenes from human tumors. In one embodiment, SAg-encoding nucleic acid is fused in frame with nucleic acid encoding oncogenic transcription factors such as FOS, JUN. MYC, MYB and ETS. In another embodiment, such nucleic acid is cotransfected with SAg-encoding nucleic acids. Either of such constructs is introduced into tumor cells or accessory cells. Proteins that interact with FOS and JUN are given in Table 1 p. 157 of Peters G et al., Oncogenes and Tumor Suppressors, Oxford University Press, Oxford UK 1997, incorporated by reference.

[0301] bcr/abl Gene

[0302] SAg-encoding nucleic acid is fused in frame or cotransfected with nucleic acids encoding the following agents and transfected into tumor cells and fused to oncogenic nucleic acids encoding chimeric proteins capable of immunizing the tumor bearing host. An ideal candidates for such fusions is the bcr-abl gene which express the bcr/abl protein in chronic myelogenous leukemia (CML). The c-abl oncogene is amplified in chronic myelogenous leukemia. Scherle P A et al., Proc. Natl. Acad. Sci. USA 87: 1908-1917 (1990) Heisterkamp N et al., Nature 344: 251-253 (1990). Abnormalities in the structure and expression of the human c-abl cellular oncogene have been associated with Philadelphia chromosome-positive CML which is present in more than 90% of cases. This aberrant chromosome marker is generated by a reciprocal translocation between chromosomes 9 and 22 in which the c-abl oncogene is translocated from the distal end of the q arm of chromosome 9 to a relatively restricted 5-6 kb region on chromosome 22 termed the breakpoint cluster region (bcr). This translocation creates a fusion gene that is transcribed as an 8 kb bcr-abl RNA that encodes the aberrant bcr-abl fusion protein product (P210) observed in CML cells. The bcr-abl fusion product has enhanced tyrosine kinase activity compared with the normal p145 c-abl product. Abnormalities in the structure and expression of the c-abl cellular oncogene have not been described in any type of human malignancy other than CML and Ph positive acute lymphatic leukemia. Gene amplification correlates with progression of malignancy.

[0303] EGF Receptor Genes

[0304] SAg-encoding nucleic acid is fused in frame to the nucleic acids encoding the EGF receptor (EGFR) (Ulrich A et al., Nature 309: 418-421 (1984)). The EGFR is the prototype of four-member receptor family. EGFR is frequently overexpressed or mutated in several different types of human tumor. For instance, the EGFR is amplified in 20-40% of human glioblastomas and a variety of epithelial tumors including head and neck squamous cell carcinomas, breast tumors, esophageal tumors and urogenital tumors. Amplification was accompanied by overexpression of the EGFR.

[0305] The erbB2 (her2/neu) Oncogene

[0306] SAg-encoding DNA is fused in frame to DNA encoding a tumor marker such as PSA, c-erbB2(neu), her2/neu, bc1-2 and Brca-1. The principal amplified and functional genes in breast cancer are the growth factor receptor-erbB2, the nuclear transcription factor c-myc, and the genes encoding cell cycle kinase regulatory genes termed cyclin D1 and cyclin EG. Gene amplification is thought to proceed via the initial formation of extrachromosomal, self replicating units (double minute chromosomes) that become permanently incorporated into chromosomal regions where they are called homogeneously staining regions (HSRs) as described above.

[0307] The human counterpart of the oncogene neu known as her2 encodes a protein of the same family as the EGFR. This family of genes has been cloned. Its products belong to a family of receptor tyrosine kinases each with a transmembrane domain, a cysteine-rich extracellular domain and an intracellular catalytic domain. They act as receptors for several peptide growth factors such as EGF, TGF(and neuregulins. The activated receptors are then able to bind to proteins containing src-homology-2 (SH2) domains. The SH2 domain proteins recognize and bind to specific phosphotyrosine-containing sequences of the activated receptor. These SH2 containing adapter molecules, then trigger downstream signalling pathways, ultimately resulting in gene activation.

[0308] The erbB2 (neu/Her2) gene maps to chromosome 17p21 and codes for a 185 kDa transmembrane glycoprotein related to, but not identical to the EGF receptor (Schechter A L et al., Science 229: 976-978 (1985), Bargmann C L Nature 319: 226-230 (1986), Hung M C et al., Proc. Natl. Acad. Sci. USA 83: 261-264 (1986), Yamamoto T et al., Nature 319: 230-234 (1986)). The EGFR bears sequence homology with the erbB1 product. The erbB2 gene is activated by a point mutation which mutates amino acid residue 664 from valine to glutamic acid; this change is associated with transforming its ability. The genes are called erbB, (erbB1, EGFr), erbB2, (neu/Her-2). erbB3(HER-3) and erb B4 (HER-4).

[0309] Amplification and overexpression of erbB2 has been found in a variety of human tumors including carcinomas of the breast, ovaries, colon, lung, liver, stomach, kidney, esophagus, salivary gland, and bladder. Genomic amplification of the neu (C-erb-2) or HER2 cellular oncogene and protein overexpression has been documented in approximately 30% of primary human breast cancers and may correlate with advanced disease and a relatively poor prognosis. More than 50% of all ductal carcinomas in situ of the large cell type express HER2. Amplification occurs in approximately 20% of invasive breast carcinomas. Thus, it is thought that HER2 amplification increases the growth rate but not the metastatic potential of tumor cells.

[0310] A third member of the EGFR family is ERBB3which is present in some human breast cancers with high expression correlating with lymph node metastases. Overexpression of ERBB3 has been observed in epidermoid carcinoma of the larynx and esophageal carcinoma. ERBB4, a fourth member of the EGFR family, was overexpressed in a human mammary tumor cell line. Fisk et al. (J. Exp. Med. 181: 2109-2117 (1995)) described an immunodominant epitope of HER/neu that is recognized by ovarian tumor-specific cytotoxic T lymphocytes. This epitope is useful in this invention. Failure of coexpression of a heterodimeric partner or coinduction of a suppressor phosphatase would explain the lack of immunogenicity of c-erbB2 in mice in nude mice.

[0311] Additional oncogenes, protooncogenes and tumor markers which would be candidates for the fusion in accordance with this invention are w PSA, c-erb B2(neu), Her2/neu, bc1-2, Brca-1. Viral and non-viral oncogenes and protooncogenes which are overexpressed in tumor cells are shown in Table 9.2 and 9.1, p. 171-172 of Franks et al., supra). The functions of the various oncogenes is shown in Table 9.6, p.186, of Franks et al.

[0312] IGF Receptor Genes

[0313] SAg-encoding nucleic acid is fused in frame with nucleic acids encoding insulin-like growth factor (IGF) receptors (IGFRs)and transfected into tumor cells. The IGFR gene is a tyrosine kinase containing transmembrane protein that plays an important role in cell growth control. There is a single IGF1 receptor gene with a complete coding sequence contained in 21 exons (Abbott A M et al., J. Biol. Chem. 267: 10759-10763 (1992); Scott J et al., Nature 317: 260-262 (1985); Liu J et al., Cell 75: 59-63 (1993)).

[0314] IGF1R is expressed at high levels in breast cancer, and amplification of the IGF1R gene has been observed. IGFs play a significant auxiliary role in tumor growth by suppression of apoptosis. The apoptotic effect overexpressed myc is overcome by IGFs. Thus, IGFs facilitate tumor growth by suppression of apoptosis.

[0315] Fibroblast Growth Factor (FGF) Receptor Genes

[0316] SAg-encoding nucleic acid is fused in frame to nucleic acids encoding fibroblast growth factors receptors (FGFs) and transfected into tumor cells. FGF receptor are also be important for the vascularization of certain types of tumors. The expression of FGF1 has been shown to be associated with a switch to an angiogenic phenotype during the development of a fibrosarcoma. Overexpression of FGF receptor by certain tumors may also contribute to their growth. FGF receptors have been shown to be amplified in some breast cancers.

[0317] Platelet Derived Growth Factor (PDGF) Receptor Genes

[0318] SAg-encoding nucleic acid is fused in frame to nucleic acids encoding additional tumor growth factors which are produced or overexpressed and transfected into tumor cells or accessory cells. Growth factors include those in the tyrosine kinase receptor families such as Platelet Derived Growth Factor A and B family (PDGF). PDGF A and B receptors are amplified in malignant glioblastomas in the malignant cells themselves or the stromal cells (Fleming T P et al., Cancer Res. 52: 4550-4556 (1992);Kumabe T et al., Oncogene 7: 627-632 (1992)). The nerve growth factor (NGF), stem cell factor receptor (kit), colony stimulating factor-1 receptor (fins), neurotropin receptor family, transforming growth factor b family, the WNT family, angiogenic receptors

[0319] Other Amplified Oncogenes

[0320] SAg-encoding nucleic acid is also fused to nucleic acid encoding the tyrosine protein kinases which are both membrane associated and transmembrane as described in Table 9.4, p. 179 of Franks et al., supra. Additional chromosomal regions which are amplified in greater than 40% of cases included the 8q24 locus of the c-myc(O) gene, the 11q13 locus of the cyclin D (O), int2 (O), EMS-1 (O), BCL-1 (O), FGF-4 (O) GST (M), MEN1(S) genes, the 17q21 locus of the RARa (S), RARg (S), ERBAa (S), BRCA1 (S), NM23 (S), estradiol 17B dehydrogenase (S) ERG2 (O), HOX2, NGFR (O), WNT3 (O) and the 20q13 locus.

[0321] Nucleic acid encoding SAg is fused or cotransfected into tumor cells with nucleic acid encoding the above oncogenes, amplified oncogenes and protooncogenes, transcription factors and growth factor receptors. These transfectants are prepared as in Examples 1. They are useful in vivo as a preventative or therapeutic vaccine (Examples 15, 16, 18-23). They are also useful ex vivo for inducing tumor specific effector cells (T cells, γ/δ T cells, NK cells, NKT cells) for adoptive immunotherapy (Examples 2-5, 7, 15, 16 18-23, 68).

### 28. Combining SAg with Angiogenic Receptors and Growth Factor Receptors

[0322] SAg-encoding nucleic acid is cotransfected or fused in frame to nucleic acid encoding an angiogenic receptor such as VEGF and transfected into tumor cells. SAg nucleic acid is also fused to or cotransfected with nucleic acid encoding other angiogenic receptors such as V integrin, other integrins, cadherins or selectins and introduced into tumor cells or accessory cells. SAg-encoding nucleic acid is also cotransfected into tumor cells or accessory cells with nucleic acids encoding angiogenic proteins such as VEGF.

[0323] VEGF is produced by tumor cells and stroma, and its expression correlates with the degree of vascularization and grade of malignancy. VEGF receptors, termed KDR and flt, are expressed mainly by the tumor endothelium. Higher levels of VEGF are found in metastatic than in non-metastatic colon cancers (Tischer E et al., J. Biol. Chem. 266: 11947-11954 (1991). VEGF is especially useful here because it is overexpressed in tumor cells at an early stage of tumorigenesis. The promoter of the VEGF gene lacks a TATA box, but has six GC boxes for transcription factor SP-1 binding and also a site for AP-1 and AP-2 binding.

[0324] The expression of the gene is modulated by several growth factors such as EGF. In some cell types VEGF expression is regulated by IL-1, FGF, PDGF. A common element, mediation of protein kinase C in the regulation of VEGF, has been suggested. VEGF is expressed as a disulfide linked dimer. Long and short forms are generated by alternative splicing and are matrix bound or released, respectively. As a result of its specific effects on endothelial cell migration and proliferation, VEGF is a very potent and specific promoter of angiogenesis. Two well characterized families of angiogenic factors act by binding to tyrosine kinase receptors that have two or three immunoglobulin-like domains, and VEGF binds to two related receptors with seven immunoglobulin-like extracellular domains.

[0325] The TRKA oncogene codes for a receptor for nerve growth factor (NGF). The TRKA gene has been found fused to genes that code for proteins that form dimers in cells leading to the synthesis of a constitutively dimerized and active tyrosine kinase. TRKA may have a tumor suppressor function since its expression in neuroblastoma correlated inversely with n-myc gene amplification. Coexpression of mRNA for TRKA and the low affinity NGF receptor in neuroblastoma correlated with a favorable prognosis.

[0326] Nucleic acid encoding SAg is fused to nucleic acid encoding the above angiogenic factors or receptors and introduced into tumor cells; alternatively, the two nucleic acids are used to cotransfected tumor cells. These transfectants are prepared as in Example 1. They are useful in vivo as a preventative or therapeutic antitumor vaccine (Examples 15, 16, 18-23). They are also useful ex vivo for inducing tumor specific effector cells (T cells, γ/δT cells, NK cells, NKT cells) for adoptive immunotherapy of cancer (Examples 2-5, 7, 15, 16 18-23, 68).

### 29. Combination of SAg with Cell Cycle Protein

[0327] SAg-encoding nucleic acid is fused in frame to nucleic acid encoding a cell cycle protein such as a cyclin which is overexpressed in tumor cells. Examples of these cell cycle proteins which are preferred for such fusions are Cyclins A, B, D1, E. These proteins are generally complexed to kinases or transcription factors at critical checkpoints in the cell cycle. The cyclins, CDKs and their inhibitors are shown in Table 1. p193 of Peters G et al., supra.

[0328] In another embodiment, nucleic acid encoding SAg is cotransfected into tumor cells with nucleic acid encoding a cell cycle protein as above. These transfectants are prepared as in Examples 1. They are useful in vivo as a preventative or therapeutic antitumor vaccines (Examples 15, 16, 18-23). They are also useful ex vivo for inducing tumor specific effector cells for adoptive immunotherapy of cancer (Examples 2-5, 7, 15.16 18-23, 68).

[0329] “Tumor specific effector cells” in this section and any other place in this application refer to T cells of any kind or type including but not limited to α/β+ T cell, αβ−T cells, γ/δT cells, NK cells, NKT cells. These cells may be used individually or collectively in any combination for adoptive immunotherapy.

### 30. Combining SAg with Tumor Suppressor Genes, p53 or Developmental Genes

[0330] SAg-encoding nucleic acid is fused in frame with tumor suppressor gene DNA and the fused nucleic acid is introduced into tumor cells or accessory cells. Alternatively, the two nucleic acids are used to cotransfected these cells. Examples of such tumor suppressor genes are shown in Table 9.7 p.187 of Franks L M et al., supra. Examples of mutated tumor suppressor genes include the APC and MCC genes and their isoforms, the DCC gene in colon cancer, the BRCA1 tumor suppressor gene in breast cancer and the DPC gene in pancreatic cancer. The p53 gene and its mutations are also useful in this embodiment. A list of p53 responsive elements and associated proteins useful in this invention is given in Tables 1 and 2 pp. 267-269 of Peters G et al., supra.

[0331] In another embodiment, nucleic acid of developmental genes is used in place of tumor suppressor or p53 genes. Examples of such developmental or differentiation genes are wnt and fwt genes.

[0332] Transfectants are prepared as in Example 1. They are useful in vivo as a preventative or therapeutic antitumor vaccine according to Examples 15, 16, 18-23). They are also useful ex vivo for inducing tumor specific effector cells for adoptive immunotherapy of cancer (Examples 2-5, 7, 15, 16, 18-23, 68).

### 31. Combining SAg with Cell Surface Glycoproteins or their Receptors

[0333] SAg-encoding nucleic acid is fused in frame with a nucleic acid encoding a cell surface glycoprotein and or its receptor and the fused nucleic acid is introduced into tumor cells or accessory cells. Alternatively, the two nucleic acids are used to cotransfected these cells. Examples of these glycoproteins or receptors include integrins, vitronectin receptors, laminin receptors, cadherins, tenascin and CD44 and isoforms, VCAM-1, P-Selectins, E-Selectin, NCAM and MCAM. Transfectants are prepared as in Example 1. They are useful in vivo as a preventative or therapeutic antitumor vaccine according to Examples 15, 16, 18-23). They are also useful ex vivo for inducing tumor specific effector cells for adoptive immunotherapy of cancer (Examples 2-5, 7, 15, 16 18-23, 68).

### 32. Combining SAg with Cytokines and Chemokines and Chemokine Receptors

[0334] SAg-encoding nucleic acid is fused in frame with nucleic acid encoding a cytokines and chemokines, and the fused nucleic acid is introduced into tumor cells or accessory cells. Alternatively, the two nucleic acids are used to cotransfected these cells. Examples of chemokines and cytokines that are useful herein include RANTES, IL-5, IL-7, IL-12, IL-13, IFN-γ, TNF-α and TNF-β. Chemokines are small (typically 6-10 kDa) peptides that have been divided into two classes designated C—C and CXC based on the sequence of the first two cysteine residues. The two families exhibit preferences for different target cell types: C—C chemokines act primarily on macrophages.

[0335] Chemokine gene expression is induced by the action of other growth factors and cytokines and are actively expressed in solid tumors showing inflammatory involvement and macrophage or neutrophil invasion. Chemokines of the C—X—C class containing the amino acid, sequence motif ELR have demonstrable angiogenic activity which can be inhibited by C—X—C chemokines lacking the ELR motif. Therefore chemokine expression by either tumor cells themselves or elicited from stromal cells by the action tumor-derived growth factors, have the potential to regulate tumor growth by modulation of angiogenesis. G-CSF is a growth factor for granulocyte precursors, and IL-2 is a growth factor for T cells.

[0336] Nucleic acids encoding SAgs are fused or cotransfected into tumor cells with nucleic acids encoding the above cytokines, chemokines and chemoattractants. The transfectants are prepared as in Example 1. They are useful in vivo as a preventative or therapeutic antitumor vaccine according to Examples 15, 16, 18-23). They are also useful ex vivo for inducing tumor specific effector cells for adoptive immunotherapy of cancer (Examples 2-5, 7, 15,16 18-23).

[0337] Chemokine Receptors: Previously we showed that 4T1 mammary carcinoma cells transfected with superantigens and CD80 molecules could be used therapeutically to reduce the number of established lung metastases and prolong survival in a murine model of post surgical mammary carcinoma (Pulaski, B. A., Terman, D. S. et al., Cooperativity of Staphylococcal aureus Enterotoxin B Superantigen, Major Histocompatibility Complex Class II, and CD80 for Immunotherapy of Advanced Spontaneous Breast Cancer in a Clinically Relevant Postoperative Mouse Breast Cancer Model, Cancer Research 60: 2710-2715 (2000)). It is believed that the superantigen transfected tumor cells, administered parenterally to the tumor bearing hosts, traffic to organs which are colonized by metastatic tumor cells. At these sites, the tumor cell transfectants secrete superantigen which induces a powerful local T cell inflammatory tumoricidal response.

[0338] The present invention aims to enhance the targeting of the superantigen transfected tumor cells to metastatic sites. This is accomplished by cotransfecting the tumor cells with nucleic acids encoding superantigens and chemokine receptors including but not limited to CXCR4. It has been shown previously that tumor cells expressing CXCR4 will metastasize to organs with a natural abundance of the ligand for CXCR4. For breast carcinoma, this includes organs which are rich in CXCL12 the natural ligand for the CXCR4 receptor.

[0339] While the CXCR4/CXCL12 system is exemplified here, any other chemokine receptor which is expressed in tumor cells and contributes to the metastatic colonization of organs rich in its receptor ligand could be used.

[0340] The gene for the CXCR4 receptor has been identified (Wegner S A et al., J. Biol. Chem. 273: 4754-4760 (1998); Caruz, A M et al., FEBS Lett. 426: 271 (1998); Frodl, R. et al., J. Receptor Signal Tranduct. Res. 18: 321 (1998)). The DNA or RNA encoding the chemokine receptor and a superantigen are cotransfected into tumor cells by methods given in Example 1. The transfected cells are tested in the 4T1 model of metastatic carcinoma in BALB/c female mice as described by Pulaski and Terman et al., Cancer Res. 60: 2710-2715 (2000). Alternatively, the SCID mouse model of established breast cancer using superantigen and chemokine receptor transfected into MDA-MB-231 human breast carcinoma cells as the therapeutic agents described by (Muller A. et al, Nature 410: 50-56 (2001) is used.

[0341] Superantigen and chemokine receptor transfected dendritic cells (using RNA or DNA encoding superantigens and chemokine receptors) are used to promote their migration and colonization of metastatic tumor sites. Once localized to tumor, the transfected dendritic cells phagocytose tumor cells and present them together with expressed superantigen to the T cells which then effect a potent T cell inflammatory tumoricidal response. In addition to tumor cells and dendritic cells mentioned above, other antigen presenting cells, accessory cells such as fibroblasts and macrophages are useful. Epithelial cells or organ-specific cells which express chemokine receptors are useful for transfection of superantigen nucleic acids.

[0342] The therapeutic system may comprise individual or mixed populations of tumor cells or accessory cells transfected with nucleic acids or RNA encoding superantigens and chemokine receptors as well as costimulatory molecules such as CD80, and MHC class II. The optimal therapeutic combinations consists of at least one population (at least 50%) consisting of tumor or accessory cells cotransfected with superantigens and chemokine receptor(s) together with a second cell population of tumor cells and/or accessory cells cotransfected with MHC class II and CD80 or other costimulatory molecule. The epithelial cells or organ specific cell types stipulated above maybe substituted for the tumor cells or accessory cells in this system.

[0343] The transfectants are administered parenterally by infusion or injection according to the protocol of Pulaski, BA ; Terman D S et al. Cancer Res. 60: 2710-2715 (2000). The number of metastases in the lungs as well as survival of experimental and control ice are determined as given by Pulaski, B A, Terman, D S et al. Cancer Res. 60: 2710-2715 (2000).

### 33. Combining SAg with Transcription Factors AP-1 and NFκA

[0344] Transcription factor genes may act as oncogenes. The jun family of transcription factors bind specifically to AP-1 sites which confer the effects of potent tumor promoting phorbol esters on responsive genes and specifically bind to c-jun homodimers or c jun/c-fos heterodimers. v-rel encodes members of the NF-kB family of transcription factors. Transforming oncogenes such as v-ets and v-myb also encode transcription factors.

[0345] The T cell signaling system responding to SAgs activates the JAK, TNF (TRAF), IL-2 and IL-12 pathway probably via NFκA activation. LPS has a T cell stimulating effect and may fuse with SAg to produce additional stimulation or epitope expansion. The NFκA nucleic acids are fused to a promoter which activates sequences encoding the SAg receptor or the sequences encoding the key Vβ domains binding SAgs or regions in the Vβ receptor which are activated by the SAgs.

[0346] SAg-encoding nucleic acid is fused in frame with nucleic acids encoding a transcription factor such as those above. Transfectants are prepared as in Example 1. These transfectants are prepared as in Example 1. They are used in vivo as a preventative or therapeutic antitumor vaccine according to Examples 15, 16, 18-23). They are also used ex vivo for inducing tumor specific effector cells for adoptive immunotherapy of cancer (Examples 2-5, 7, 15, 16 18-23, 68).

### 34. SAgs Augment the Immunostimulatory Effects of Tumor Associated Peptides, Binary and Ternary Complexes

[0347] Bacterial SAg are presented to T cells via the MHC class II molecule by multiple low affinity attachments, resulting in stimulation of the T cell with very low concentrations of antigen. SAgs augment the presentation of antigenic peptides to T cells without sterically interfering with each other's ability to bind and activate the TCR. These augmenting peptides are incorporated into the SAg structure. SAgs may also bind to binary or ternary complexes of tumor peptide-MHC class I or tumor peptide-MHC class II complexes, either in solution or affixed to a TCR or the surface of an APC.

[0348] In one embodiment, the SAg is first bound to APCs or T cells followed by addition of complexes between MHC class I or class II and tumor peptide. Alternatively, the SAg may first bind to either cell-bound, soluble or immobilized MHC class I or class II molecules, after which the tumor peptide is added. This trimolecular complex is then presented to the T cell via the TCR.

[0349] In another embodiment, SAg is first bound to an APC or to a TCR Vβ chain on an NKT cell. Following this, CD1-glycosylceramide complexes are added and allowed to bind to NKT cell TCR Vβ chain. SAg may be bound to first to CD1-glycosylceramide complexes in soluble form, affixed to CD1+ cells or NKT cells via the TCR. SAgs may be bound to CD1 complexes with glycosylceramide or a glycosphingolipid (with a conserved SAg binding site) in solution or when fixed to CD1+ cells or NKT cells. Alternatively, SAgs are bound to ternary complexes consisting of CD1-glycosylceramide affixed to the NKT cell TCR or bound to CD1-glycosylceramide on APCs, in solution or immobilized, before it has affixed to the NKT TCR. SAg is alternatively bound to binary complexes of (a) CD1-glycosylceramide, (b) CD1-glycosphingolipid, (c) CD14-LPS or (d) MHC-tumor peptide complexes that have either a SAg receptor sequence or a TCR Vβ SAg-binding sequence.

[0350] The complexes described above are used in vivo as preventative or therapeutic antitumor vaccines according to Examples 4, 15, 16, 18-23. They are also used ex vivo for inducing tumor specific effector cells that are then taken for adoptive immunotherapy of cancer. (See Examples 2-5, 7, 14, 15, 16 18-23, 68).

### 35. SAgs Combined with Products of Antigen Processing Pathways

[0351] A chimeric gene is prepared consisting of SAg-encoding nucleic acid fused in frame to nucleic acids encoding (a) the endoplasmic reticulum (ER) translocation signal peptide, (b) transmembrane domain, and (c) lysosomal targeting domain of LAMP-1. LAMP-1 is a type 1 transmembrane protein localized predominantly to lysosomes and late endosomes. The cytoplasmic domain of LAMP-1 contains the Tyr-Gln-Thr-Ile sequence that mediates the targeting of LAMP-1 into the endosomal and lysosomal compartments. The specific targeting of the SAg to the endosomal and lysosomal compartments allows SAg peptides to complex with MHC class II molecules and enhance presentation.

[0352] The MHC class I presentation pathway operates on a three level system. At one level there is protein machinery dedicated to peptide manufacture—the proteosome complex. The selective peptide transporters deliver antigens into the ER. The class I molecules themselves exhibit variable affinities for peptides. Genes clustered in the region of the class II gene encode proteosome and transporter. SAg peptides are transported into the ER—primarily through a transmembrane “tube” consisting of two polypeptide chains called TAP-1 and TAP-2 (transporter associated with antigen processing). In mammals, genes encoding TAP-1, TAP-2 and two proteosome polypeptides are all located within the class II region of the MHC.

[0353] The class I pathway starts in the cytosol where proteins produced inside the cell are degraded by the multicatalytic proteosome complex. The peptide products are translocated into the ER by the TAP proteins. In the lumen of the ER, the peptides bind the class I protein groove while the latter are complexed with the chaperone p88, P₂M and TAP. After securing a peptide in its binding groove, the class I complex is released from TAP and transported through the Golgi apparatus to the cell surface. TAP genes are closely linked to the LMP2 and LMP7 in the class II MHC gene cluster and belong to a family of molecules involved in ATP-dependent membrane translocation known as the ABC (ATP-binding cassette) transporters. TAP1 and TAP2 function as a heterodimer each subunit having over 500 amino acids each with two hydrophobic domains, six membrane spanning regions and a cytosolic ATP binding motif Both TAP1 and TAP2 subunits are required for peptide binding and translocation. TAP1 appears to be uniquely involved in the interactions with class I/β2 dimers at the luminal membrane of the ER where it interacts with the membrane proximal region of the α3 domain of class I-β₂m complexes prior to peptide loading. Interaction between class I and TAP is crucial for efficient peptide loading. Antigen presentation is mediated by an additional factor, tapasin. TAP also binds 2M independently of class I heavy chain, perhaps facilitating rapid assembly of class I peptide-binding complexes. TAP heterodimer may show a preference for amphipathic molecules as T cell antigenic determinants are often seen clustered around sequences where amphipathic helical structures are predicted. TAP prefers peptides 8-10 residues in length but may transport peptides ranging from 7-40 residues.

[0354] Invariant chains are transmembrane glycoproteins found in intracellular compartments in association with class II molecules. Multimers consisting of three class I ab dimers and three invariant chains assemble rapidly in the ER and travel across Golgi bodies to the trans-Golgi network that intersects with the endocytic pathway, where class II molecules reside for about 1-3 hr before transit to the cell surface for display to T cells. Alternative splicing of the invariant transcripts produces two isoforms p31 and p41 both of which can operate to assist folding of class II dimers, direct the passage of class II from the ER through an exocytic pathway, and block loading of peptide until peptide sampling can occur as exocytic-endocytic pathways intersect. A four residue targeting signal at the N-terminus of the invariant chain that is essential for intracellular transport to endosomal compartments. The C-terminus and the transmembrane region or the invariant chain are also necessary for sorting of class II-invariant chain complexes to the endosome. p41 appears to regulate the production of a stable 12-kDa SLIP-class II complex capable of enhancing SAg presentation.

[0355] SAg-encoding nucleic acid is fused in frame with nucleic acid encoding a protein involved in the antigen processing pathway such as the invariant chain or TAP which facilitates the expression of the SAg in the context of MHC class I and II, respectively. Tumor cells, accessory cells and hybrids thereof are transfected with fused SAg-invariant chain DNA as in Examples 1 and 5. They are used in vivo as a preventative or therapeutic antitumor vaccine according to Examples 15, 16, 18-23. They are also used ex vivo for inducing tumor specific effector cells for adoptive immunotherapy of cancer (Examples 2-5, 7, 15, 16 18-23).)

[0356] SAg polypeptide post translationally is fused or associated with additional molecules such as mono and diglycosylceramides, including but not limited to—anomeric mono—and digalactosylceramides GalCer, α-gal, glycosylated and prenylated SAgs. These constructs translocate with the appropriate trafficking molecule e.g., invariant chain, TAP, LMP, to selected surface receptor such as MHC class I, MHC class II or CD1. These transfectants are prepared as in Example 1. They are useful in vivo as a preventative or therapeutic antitumor vaccine according to Examples 15, 16, 18-23. They are also useful ex vivo for inducing tumor specific effector cells for adoptive immunotherapy of cancer (Examples 2-5, 7, 15.16 18-23, 68).

### 36. SAgs Combined with Signal Transduction Molecules or Heat Shock Proteins (HSPs)

[0357] SAg-encoding nucleic acid is fused in frame to (or cotransfected with) a nucleic acid encoding “signal transduction molecules” such as Ras, JAK 1 and STAT-1a and heat shock proteins HSP-60, HSP-70, HSP-90a, HSP-90b, Cox-2 as well as heterotrimeric G proteins and ATPases. The genes for Staphylococcal HSP-70 useful in this invention have been cloned (Ohta, T et al., J. Bacteriology 176: 4779-4783, (1994)). As used herein, SAg polypeptides are ligated to any of above structures at the peptide or nucleic acid level. Preferred proteins for this embodiment are G proteins, ATPases and HSPs. Chemical conjugation is carried out by conventional methods, e.g., use of preferred heterobifunctional crosslinkers. Alternatively, conjugates are produced genetically as fusion proteins by conventional methods. In yet another embodiment, the conjugates are created by permitting natural binding of the components to each other without chemical modification. Any of the foregoing conjugates or fusion proteins may be used when incorporated into vesicles or exosomes secreted from a cell. See Example 36 for methods and protocols.

[0358] SAg-encoding nucleic acid is fused in frame (or cotransfected) with nucleic acid encoding a signal transduction protein or HSP. Transfectants are prepared as in Example 1. They are used in vivo as a preventative or therapeutic antitumor vaccine according to Examples 15, 16, 18-23. They are also used ex vivo for inducing tumor specific effector cells for adoptive immunotherapy of cancer (Examples 2-5, 7, 15, 16 18-23, 68). The peptide or polypeptide conjugates are also useful for the same purposes.

### 37. SAgs with Specialized Sites for C-terminal GPI Anchoring, Glycosylation, Sulfation, N-Myristoylation, Phosphorylation, Hydroxylation, N-Methylation, Signal Peptide Binding, LPS Binding HSP Binding, Chemokine Binding and Prenylation

[0359] SAg-encoding nucleic acid is fused in frame to nucleic acids encoding the above “specialized sites” and transfected into tumor cells or accessory cells The structures of these sites is given in Table 3, p. 48 of Rocker R B I et al., J. Nutrition 123: 977-990 (1993).

[0360] Tumor or accessory cells express SAgs in a variety of fashions after post-translational modification (Wilkins, M R. et al., Proteome Research: New Frontiers in Functional Genomics Springer Berlin, Germany (1997)). For example, myristoylated SAg will bind to surface lipids and will be minimally secreted. In glycosylated form, the SAg will be routed to the class II pathway and appear bound on the cell surface. When bound to invariant chain, the SAg will be routed to the class II receptor.

[0361] Nucleic acids encoding proteins that active in post-translational modification of SAgs are fused in frame to nucleic acid encoding SAgs. These posttranslational modifiable sites include, but are not limited to, a C-terminal GPI anchor, glycosylation site, palmitoylation site, myristoylation or prenylation site, N-methylation site, hydroxylation site, phosphorylation site, sulfation site, signal peptidase site, carboxylation site and prenylation sites.

[0362] The incorporation of many membrane proteins into the lipid environment is based on sequences of largely hydrophobic amino acids that can form membrane spanning domains. However, a large number of membrane associated proteins do not display hydrophobic elements in their primary sequences. The capacity for membrane association in these cases is often provided by covalent attachment (either cotranslationally or post translationally) of lipid groups to the polypeptide chain. Acylation of proteins by addition of C14 myristic acid to an N-terminal gly residue or addition of C16 palmitic acid by thioester linkage to cysteine residues is in a variety of positions in SAgs. Palmitoylation of SAgs is not restricted to thioester linkage and may occur through oxyester linkages to serine and threonine residues. Furthermore, thioester linkage of fatty acyl groups to proteins is not restricted to palmitate. Longer chain fatty acids such as stearic acid (C18) and arachidonic acid (C20) are also produced. The addition of palmitoyl and/or myristoyl groups with varying lengths confers additional and sufficient binding energy for hydrophobic binding of proteins to receptors, membranes or lipid bilayers. The attachment of palmitate is sufficient whereas the attachment of myristate is insufficient in isolation. Palmitoylation thus provides a means for membrane anchorage of SAgs and can allow effective concentration of an enzyme or other regulatory proteins at the membrane.

[0363] Glycosylated SAg is better capable of binding to oligosaccharide receptors on blood vessels, inflammatory cells or immunocytes. Signal peptide sequences permit the SAg to be routed to various cell surface receptors. Prenylation is important in the membrane attachment and protein-protein interactions of SAgs and oncogene activation. Prenylation, or post translational enzymatic addition of prenyl, geranyl, farnesyl or geranylgeranyl, involves reactions of a prenyl diphosphate with a cysteinyl sulfhydryl group near the C terminus of the protein to give a prenyl-S-Cys moiety.; Characteristically the Cys-ali-ali-Xaa sequence (“ali” is an aliphatic amino acid; Xaa is any amino acid) is recognized by the transferase that catalyzes the reaction. When Xaa is serine, alanine or methionine, the protein is farnesylated; when Xaa is leucine, it is geranylgeranylated. Farnesylation of the protooncogene p21^{ras} is integral both for its membrane association and transforming activity. Farnesylated proteins mediate the induction by IL-1b of NOS whereas a geranylgeranylated proteins repress this induction.

[0364] Nucleic acids encoding HSPs, along with their promoters, are fused in-frame (or cotransfected) with SAg nucleic acid. These include but are not limited to two recently discovered HSP genes, orf37 and orf35 in Staphylococcus aureus that are upstream and downstream of grpE(hsp20), dnaK(hsp70) and dnaJ(hsp40) in the following sequence: orf37-hsp20-hsp70-hsp40-orf35. The promoters are located upstream of orf37 and upstream of hsp40. These fused proteins are useful as preventative or therapeutic antitumor vaccines according to Examples 15,16, 18-23. They are also useful ex vivo for producing a population of anti-tumor T cells, NKT cells or NK cells for adoptive immunotherapy of cancer (Examples 2-5, 7, 15, 16, 18-23).

[0365] Most eukaryotic cells are decorated with chemical groups such as phosphates, methyls, sugars, or lipids during or after their translation from mRNA. These extra groups have various functions, often serving as switches or localization signals. One lipid modification is protein prenylation in which a 15-carbon farnesyl or 20-carbon geranylgeranyl group is attached to the protein's —COOH terminus followed by other modifications (proteolysis, methylation, and palmitoylation).

[0366] Most prenylated proteins are members of signal transduction cascades. For example, the—subunits of heterotrimeric guanosine triphosphate (GTP)-binding proteins (G proteins) and virtually all members of the Ras superfamily of proteins. Farnesylation of H, K, N-Ras is essential for the ability of oncogenic mutants of these proteins to transform cells. 30% of established tumor cell lines contain mutationally activated Ras proteins. FTase inhibitors shrink tumors in animals to an undetectable size with no significant toxicity after weeks or months of exposure. Farnesylation is a prerequisite for palmitoylation. Palmitoylation of H-Ras occurs only in the plasma membrane by a putative membrane-bound palmitoyl transferase. Farnesylation may bring a finite amount of H-Ras to all cell membranes, at which point and palmitoylation is required to trap it in the plasma membrane. H-Ras palmitoylation like G protein-subunit palmitoylation, is reversible and may regulate signal transduction. COOH terminal proteolysis of prenylated proteins and methylation are required for palmitoylation, membrane binding and Ras function. Prenyl protein specific protease and methyltransferase like Ftase may be good targets for drugs that prevent oncogenesis.

[0367] Common N terminal additions are fatty acid acylations and glycosylations which provide polypeptide chains with short “lipophilic handles” or recognition sites that serve to facilitate their vectoral transport or compartmentalization are common N-terminal additions. For example, myristic acid in the form of myristyl CoA serves as a substrate for specific N-terminal acylations that are important in anchoring proteins to endoplasmic membranes. The most common C-terminal modifications are amidations, acylations, polyadenylations and the enzymatic additions of tyrosyl residues. Similarly the C-terminal acylation process is complex. Prenylation occurs at Cys residues is often associated with proteins that end in Cys-Val-Ile-Ala. The reaction sequence involves (1) a first prenylation (addition of a farnesyl moiety to Cys) followed by (2) cleavage of the Ala, Ile and Val residues and (3) the carboxymethylation of the resulting C-terminal prenylated cysteine. In addition to providing a membrane anchor, this modification often is essential to function of oncogenes such as Ras.

[0368] Two separate and well characterized pathways for carbohydrate addition: the N-linked dolichol pyrophosphate mediated pathways and the O-linked pathways that utilize UDP sugars as substrates and hydroxylated amino acid side chains as sites for attachments. Side chains amino phosphorylation of specified proteins usually at tyrosyl or serinyl residues as a way of causing cascade-like amplifications in a metabolic system. Methylation and methyl additions can also serve as novel on-off switches for metabolic processes. The targeted amino acids or methyl additions are lysine, histidine and arginine. In prokaryotes, reversible methylations of aspartyl and glutamyl side chains can occur. The best example is carboxymethylation of glutamate which is associated with bacterial chemotaxis and is elaborated by the opening and closing of membrane ion channels upon methylation and demethylation. Post translational modifications can lead to crosslinking and stabilization of protein matrices. Amino acids such as L-lysine, L-glutamine, L-cysteine and L-tyrosine are utilized extensively as sources for protein cross-linking. Examples include the extracellular matrix cross linking of collagen and elastin and the stabilization of keratin-derived matrices and tubulin by -glutamyl lysine crosslinks.

[0369] In bacteria, the majority of proteins that form durable wall associations possess either distinctive N-terminal signals (lipoproteins) or more commonly distinctive C terminal wall associating signals although a number of wall associated proteins possess neither of these types of signals. A number of wall-associated proteins in gram-positive bacteria are anchored to the external surface of the cytoplasmic membrane via a covalently attached lipid moiety. Both gram-negative and gram-positive lipoproteins possess similar distinctive N-terminal signal sequences which contain a tetrapeptide consensus at the cleavage site consisting of Leu-X—Y-Cys where X and Y are predominantly small neutral residues and signal and signal peptidase cleavage occurs between Y and Cys. This sequence directs either co- or post translational modifications involving transfer of glycerol from phosphatidylglycerol to the +1 Cys, followed by the transfer of fatty acids from phospholipid to the glyceryl-prelipoprotein to produce a diglyceride-prelipoprotein. The C terminal end of a large number of Gram positive wall-associated proteins share common structural features that are required to localize these proteins in the cells wall. These C-terminal structures include a number of distinct features. At the extreme C-terminus there is a stretch of 15-22 hydrophobic residues, followed by a short tail of predominantly charged amino acids. Immediately upstream from this hydrophobic/charged-tail domain, there is a highly conserved Leu-Pro-X-Thr-Gly-X (LPXTGX) motif which is usually preceded by a sequence containing a high proportion of regularly spaced prolines. GPI anchors have not been identified on bacterial cell surface proteins. But the strong conservation of the LPXTGX motifs and of a hydrophobic/charged tail residue-helical domain are common structural features that are required to localize these proteins in the cell.

[0370] Protein A is covalently coupled to the cell wall whereas of the proteins are not. Non-covalent interactions may occur in some proteins holding it in the cell wall while cross-linking occurs around proline rich region to form peptidoglycans. Hydrogen or water binding sites can be created by hydroxylation reactions, e.g., hydroxylation of proline in collagen provides sites for intrachain hydrogen and H2O bonding.

[0371] SAg-encoding nucleic acid is transfected into cells together with coding regions to permit the above post translational modifications which contribute to the production of an immunogenic tumor cell, accessory cell (preferably a DC) or a tumor cell/accessory cell hybrid. Such nucleic acids encoding the sites for post-translational modifications of SAgs are useful in the structural modification, translocation, cell surface binding and association with key energy-producing and signal transduction molecules and receptors. The cells expressing the products of these post-translational modifications are useful as a preventative or therapeutic antitumor vaccine according to Examples 15, 16, 18-23). They are also useful ex vivo for producing a population of tumor specific effector cells (α/β+T cells γ/δ T cells, NKT cells, NK cells) for adoptive immunotherapy of cancer (Examples 2-5, 7, 15, 16, 18-23).

### 38. SAgs and SAg Proteomes for Enhanced Immunogenicity, Specificity and Intracellular Trafficking of Soluble or Cell-Bound Binary or Ternary Complexes

[0372] SAgs with genetically engineered binding sites are provided in order to enhance their coupling to bioreactive complexes, peptides and LPS's and galactosylceramides. SAgs with a glycosylation other glycosylceramide binding site bind to glycosylceramide-CD1 or glycosylceramide-CD1 complexes alone in soluble or immobilized form, or cell bound after binding to a receptor on a T cell or NKT cell. SAgs are also provided with an LPS binding site for binding to soluble, immobilized or cell bound LPS-CD14 complexes.

[0373] SAgs are provided with a glycosphingolipid or glycosylceramide site by which they can bind to CD1-glycosylceramide or CD1-glycopsphingolipid complexes present in soluble, immobilized form or affixed to CD1+ cells or NKT cells. Glycosylated SAgs are bound to CD1-glycosylceramide complexes in soluble form or fixed to CD1+ cells or NKT cells. SAgs are also provided with an overexpressed site for MHC class I molecules, to increase the effectiveness of binding to MHC class I-tumor peptide antigen complexes or TCR-bound MHC class I-tumor peptide complexes.

[0374] SAgs are engineered with repeating peptides which bind to the Vβ chain to increase clustering. SAgs with an “overexpressed” (in terms of number) SAg receptor site binds to tumor cells expressing SAg receptors. SAgs possess a site for binding HSPs which are useful in immunizing normal or anergic T cells in a tumor patient. SAgs bind to T cell antagonist MHC-tumor peptide complexes converting the binary complex to a ternary complex with T cell agonist activity. Anergic T cells are activated by these ternary complexes.

[0375] SAgs are prepared with an overexpressed site for binding glycosphingolipids or glycosylceramides. These complexes are loaded onto CD1 receptors of antigen presenting cells and presented to the tumor bearing host either in vivo or ex vivo (Examples 4, 5, 7). SAgs with a myristoylation site will bind to bacterial glycolipids such as lipoarabinan or a mycolic acids The binary complex is then loaded onto APCs expressing CD1 receptors. These cells are then used in vivo (Example 14, 15, 16, 18-23) to produce a tumoricidal response. Alternatively, they are used ex vivo to produce tumor specific effector cells for adoptive immunotherapy (Examples 2, 7, 14, 15, 16, 18-23, 68).

[0376] A SAgs may also be prepared with signal sequences for protein sorting and intracellular trafficking. Signal sequences comprise short stretches of amino acids located at the N terminus of a protein, the C terminus or in the middle of the peptide chain. The physical properties of these sequences e.g., their polarity or charge. Signal regions are three dimensional domains on the surface of a protein made up of different fragments of the same peptide chain or by different chains altogether. Structural signals are recognized and bound by receptors located on the membranes of organelles. Signal sequences also serve as recognition sites for enzymes which modify the proteins altering their properties and bring about a change in their fate. Once they have fulfilled their function, some of the signal sequences are removed by sequence specific hydrolases. Signal peptides fused to SAgs guide them to the secretory or exocytosis pathway, or to proteins localized to the endoplasmic reticulum, lysosomes, mitochondria, nucleus, peroxisomes or secretory vesicles.

[0377] Lipid Rafts Comprising SAg Plus Signal Transduction Molecules

[0378] Lipid rafts are small glycosphingolipid- and cholesterol-rich plasma membrane microdomains on the cell surface to which proteins and lipids have variable affinities. They function as platforms for both signal transduction and membrane trafficking.

[0379] Sphingolipid-cholesterol rafts are insoluble in the detergent Triton X-100 at 4° C., in which they form glycolipid-enriched complexes (DIGs). Because of their high lipid content, these detergent-insoluble, glycolipid-enriched complexes (DIGs) float to a low density during gradient centrifugation, which enables any associated proteins to be identified and distinguishes DIGs from other detergent-insoluble complexes. Milder detergents such as octylglucoside will solubilize lipid rafts. Glycosphingolipids are insoluble by themselves, and sphingomyelin is resistant to detergent extraction in the presence of cholesterol.

[0380] A model for the organization of sphingolipid-cholesterol rafts is as follows: Sphingolipids associate laterally with one another, probably through weak interactions between the carbohydrate heads of the glycosphingolipids. The sphingolipid head groups occupy larger excluded areas in the plane of the exoplasmic leaflet than do their predominantly saturated lipid hydrocarbon chains. Any voids between associating sphingolipids are filled by cholesterol molecules which function as spacers. The close-packed sphingolipid-cholesterol clusters behave as assemblies within the exoplasmic leaflet, where the intervening fluid regions are occupied by unsaturated phosphatidyl-choline molecules. Glycosphingolipids usually carry a long fatty acid which is amide-bonded to the sphingosine base and can interdigitate with the cytoplasmic leaflet of the bilayer. As cholesterol is present in both leaflets, it functions as a spacer in the cytoplasmic leaflet as well, filling voids created by interdigitating fatty acid chains. Rafts contain proteins attached to the exoplasmic leaflet of the bilayer by their GPI anchors, proteins bind to the cytoplasmic leaflet by acyl tails (e.g., the Src-family kinase) or proteins associate through their transmembrane domains, Interactions with raft lipids may be mediated by binding to cholesterol and by acylation of C-terminal cysteines.

[0381] The most important property of the lipid microdomains is that specific proteins associate with them. Glycosylphosphatidylinositol (GPI)-anchored proteins and doubly acylated kinases bind to rafts by their lipid moieties. Also several transmembrane proteins have been recovered in DIGs. Several proteins have been identified as residents of these lipid microdomains, including caveolin, GPI-linked membrane proteins, influenza hemagglutinin, the high-affinity IgE receptor, and the B cell integral membrane protein CD20. In addition, several molecules involved in signal transduction have been shown to be associated with lipid rafts such as the Gα subunits of heterotrimeric G proteins, the double-acylated Src family protein tyrosine kinases Lck, Lyn, and Fyn, and the Zap70 family protein tyrosine kinase, Syk. The lipid rafts are also associated with actin and actin-binding proteins.

[0382] The function of rafts in signal transduction is to select and concentrate molecules or receptors in a micro-environment of the membrane thus speeding up binding during signalling and preventing inappropriate crosstalk between pathways. They are also depots of cargo molecules and transport machinery for trafficking. Clustering of GPI anchors with rafts leads to interaction with signal-transducing proteins that then become activated. They facilitate interaction with ligands and effectors on both sides of the membrane to include kinases and their substrates for signal transduction. Two Src family kinases, Lck and Fyn, both implicated in T-cell activation, are immunoprecipitated with GPI-anchored proteins after Triton X-100 extraction. Indeed, rafts maintain a pool of the hyperphosphorylated (inactive) Src-like kinase Lck which interacts with rafts by its myristyl and palmitoyl anchor. Trimeric G proteins and Ras also associate with DIGs. Upon cross-linking the TCR, its associated signaling molecules and coreceptors acquire increased affinities toward lipid rafts. Integrity of these domains is required for efficient signal transduction by the TCR. Lipids involved in signal transduction have also been localized to DIGs which include phosphoinositides such as phosphatidyl-inositol-(4,5)-bisphosphate and sphingomyelin.

[0383] Superantigens alone or in combination with other molecules including but not limited to GPI, signal transduction molecules G proteins, ganglioside/glycolipid transfer agents (See glycolipid transfer factors-Section 58 and influenza virus hemagglutinin, HA 2 or Sendai virus or the heptad repeat unit), and tumor associated antigens are coupled to lipid rafts by methods given in Example 4. The lipid rafts can also contain a α-1-4 digalactosylceramides which are natural receptors for SAgs. These derivatized lipid rafts are rapidly integrated into cell membranes and are used to activate inhibitory or apoptotic pathways in tumor cells. They are useful in transferring receptors to tumor cells or T cells which recognize natural ligands for the activation tumor cell apoptosis. They activate T cells and NKT cells by provision of superantigens, receptors and key signal transduction molecules, e.g., lyck or fyn involved in T cell activation. Delivery of tumor associated antigens via lipid rafts, has the added advantage of stimulating T cells from tumor bearing patients which have been anergized in the course of tumor growth.

[0384] Lipid rafts are prepared as given in Example 61. They are useful in vivo as a preventative or therapeutic antitumor vaccine. They are administered parenterally in doses of 0.01-1 μg in normal saline three times weekly either before or after tumor implantation. When given after implantation, the treatment is continued for four weeks (Examples 5, 15, 16, 18-23, 57-59). They are also useful ex vivo to immunize T or NKT cells to produce a population of tumor specific effector T cells for adoptive immunotherapy of cancer. For ex vivo use the lipid rafts are incubated with T cells (αβT cells, γ/δT cells, NK cells, NKT cells) or antigen presenting cells in doses of 0.1-1 μg for 24 hours after which the cells are harvested and administered (Examples 2-5, 15, 16, 18-23, 57-59, 68).

[0385] GPI-SAg-Ceramide or GPI-SAg-CD1-Ceramide Complexes Expressed on Tumor Cells, Antigen Presenting Cells, Yeast Displays, Sec Yeast Mutants, APC/tc Hybrid and Shed as Exosomes

[0386] Cells Expressing, Overexpressing or Shedding GPI Proteins are Prepared so that they Comprise Covalently- or Noncovalently Bound Mono- or Diglycosylceramides with Terminal or Subterminal α1-2, α1-4 or α1-6 Configurations and SAg Protein or Peptide Moieties.

[0387] The synthetic pathway involves transfection of SAg DNA into a tumor cell or accessory cell or a hybrid thereof. The SAg protein is translated in a precursor form consisting of a receptor-coding region sandwiched between amino and carboxy-terminal sequence signals. In the endoplasmic reticulum, the signal peptides are cleaved and a GPI anchor comprising a glycosylceramide optionally bonded to a phytosphingosine chain is attached at a specific site designated w. Further post-translational modifications are made in the Golgi before trafficking to the outer leaflet of the plasma membrane. Once GPI-SAg molecules arrives at the cell surface, they may remain entirely mobile within the lipid bilayer or may associate within membrane subdomains.

[0388] GPI-SAgs are released from the cell surface into the extracellular milieu. They leave the cell surface as SAg-glycan-lipid complexes, as SAg-glycan complexes or as free SAgs devoid of a GPI anchor. GPI-SAgs released from intact cell are also released free of their lipid moiety, hence their designation as LIP(−) GPI-SAgs, whereas those presumably released with an intact lipid moiety are termed LIP(+) GPI-SAgs. The lipid free moieties are more hydrophilic and therefore soluble in an aqueous environment, whereas the intact lipid-glycan-protein complexes travel in more hydrophobic environments. In the absence of detergents, the released or “shed” LIP(+)-GPI-SAgs in vivo are vesicles with clearly defined lipid bilayers or as hydrophobic aggregates lacking a bilayer morphology. These shed vesicles, often referred to as exosomes, contain many LIP(+) GPI-SAgs. The shedding process itself appears to depend on GPI-proteins, because vesiculation is reduced by 50-90% in cells lacking GPI proteins.

[0389] Shedding is enhanced by treating the tumor cells with 20 mM retinoic acid. In addition high concentrations of glycosphingolipids on the tumor cell surface are generated by selective transport from the site of synthesis to the cell surface. Provision of ceramide containing the α2-hydroxy fatty acid C6OH results in (1) conversion to galactosylceramide, galabiosylceramide and sulfatide and (2) sorting in the trans-Golgi network to the tumor cell surface. GPI-SAgs remain biologically active after being released from the outer leaflet of cell membranes. LIP(+) GPI proteins may also transit to adjacent membranes where they associate with the exogenous membranes by incorporating themselves into the lipid bilayer in addition to binding to surface receptors.

[0390] Additionally, superantigen or oxyLDL receptor nucleic acids are transfected into yeast sec mutant. The yeast sec mutant,6-4, contains a temperature sensitive mutation in a gene product required for the transport of secretory vesicles for the trans-Golgi network to the plasma membrane. Gene expression is initiated by an inducible promoter concomitant results in the arrest of vesicle fusion and the insertion of SAg or LDL receptor protein in the plasma membrane. Thus gene expression begins at the same time that secretory vesicles become unable to fuse with the plasma membrane, ensuring that the desired gene products accumulate in the membranes of these vesicles. The purification of these vesicles is rapid and simple, thereby facilitating the subsequent characterization of the desired gene product. Because the Sec6 protein is known to be involved only in the fusion of these vesicles with the plasma membrane, translocation and processing of proteins in the endoplasmic reticulum and processing in the Golgi are largely unaffected by the Sec6 mutation.

[0391] The transfected superantigen or LDL nucleic acid (plasmid) is expressed as superantigen polypeptide or oxyLDL receptor polypeptide in vesicles in association with yeast GPI-lipid membrane structures. The lipid portion of the SAg-GPI-lipid complex comprises a ceramide with a C26 dihydroxy sphingosine or phytosphingosine configuration which is essential for activating NKT cells. The resulting SAg-GPI-phytosphingosine vesicles have the capacity to activate T cells via the superantigen and NKT cells via the phytosphingosine and thus produce a potent anti-tumor effect. Administered preferably by direct administration into the tumor, the oxyLDL receptors induce an excessive accumulation of endogenous or exogenously administered oxyLDL and LDL at the tumor site. The deposited oxyLDL induces apoptosis and foam cell formation in tumor cells and tumor microvascular endothelial cells resulting in potent tumoricidal response. Optionally, SAg-GPI-phytosphingosine are expressed on these vesicles together with vesicles expressing oxyLDL receptor-GPI-phytosphingosine or oxy LDL receptors. Tumor associated peptides and polypeptides, tumor apoptosis inducing peptides and polypeptides including but not limited to thrombospondin, angiogenesis inhibitor peptides and polypeptides including but not limited to angiostatin or VEGF are also useful fused or conjugated to SAgs in the same sec mutant or coadministered with the SAg-sec mutant in a separate sec mutant. Vesicles containing all of the above constructs including but not limited to SAg-GPI-phytosphingosine or oxyLDL receptor-GPI-phytosphingosine are prepared and isolated according the method of Coury L A et al., Methods in Enzymology 306: 169-186 (1999) and as in Examples 4, 5, 7, 42, 50-51.

[0392] All of the constructs given above are administered preferentially by direct intratumoral injection as given in Example 20. They are useful in vivo as a preventative or therapeutic antitumor vaccine according to Examples 2, 7 14-16, 18-23, 36. They are also useful ex vivo to produce a population of tumor specific effector cells (αβT, γ/δT, NK, NKT cells) for adoptive, immunotherapy of cancer (Examples 2-5, 7, 15, 16, 18-23, 68).

[0393] A yeast cell display system is also used to present SAg to T cells, NKT cells or NK cells in the context of phytosphingosine groups present in the yeast cell membrane. The yeast displays are prepared by the method of (Cho B K et al., J. Immunologic Methods, 220: 179-188 (1998) and used to activate T cells, NK cells and NKT cells. The yeast presentation has the advantage of presenting as many as 10⁵ proteins per cell at the yeast surface potentially allowing multivalent interactions to occur between the yeast and target cell. The superantigen gene is transfected into the S. cerevisiae. Individual colonies of the transfected yeast are grown overnight in the Trp-media and harvested in the log phase. Murine splenocytes (10⁵) are incubated with varying number of yeast cells that bear the superantigen. After 20 h in culture, cells are harvested, washed in PBS and screened for activation markers. In this yeast display system constructs including but not limited to SAg-phytosphingosine or SAg-GPI-phytosphingosine, SAg-lipid or lipoprotein conjugates are presented to T cells and NKT cells to produce a population of tumor specific effector cells (T cells, NKT cells or NK cells) useful for the adoptive therapy of cancer under protocols given in Example 2, 7, 14, 15, 16, 18-23. They are also useful as a vaccine or against established tumor as given in Examples 14, 15, 16, 18-23, 68.

### 39. Effector T Cells: Methods of Lowering Activation Threshold for Activation by SAg

[0394] Tumor peptide MHC complexes are insufficient to activate T or NKT and may even induce antagonism or anergy. SAgs added to the complexes are useful to overcome activating T or NKT cells and overcoming the anergy common in tumor-bearing hosts. To enhance responsiveness to tumor-peptide-MHC-SAg complexes and to overcome anergy, it is desirable to reduce the threshold for signal transduction in an effector T or NKT cell population. To accomplish this, nucleic acids encoding SAg-specific TCR Vβ regions are transfected into T or NKT cells to duplicate or otherwise induce overexpression. In addition, measures are taken to alter signal transduction by dimerizing the tyrosine kinase receptors or deleting the inhibitory region of the TCR.

[0395] Most SAgs show selective binding to well defined segments of the Vβ chain of the TCR. The TCR genes are clustered on chromosome 7 and include 75-100 V, 2D, 13 J, and 2 Cβ genes. The entire 685-kb human locus has been sequenced, the longest contiguous subfamilies that exhibit >75% sequence identity at the DNA level. The human TCR locus is on chromosome 14 and consists of 42 V genes, 61 J genes and 1 Cβ gene. The TCR chain genes are on chromosome 6 and consist of approximately 23V, 2D, 12J, and 2C gene segments. The 2 Cβ genes form clusters with upstream Dβ and Jβ segments: Cβ1 rearranges only with Db1/Jb1 genes whereas Cβ/Bβ rearranges with both Dβ and Jβ segments. Similarly, functional Vβ genes appear to rearrange to both J clusters in a random fashion. The β chain transcripts of antigen-specific T cell clones appear to contain little length variation and harbor conserved N additions.

[0396] A mechanism for achieving diversity in variable (antigen-specific) regions of the TCR involves the random addition of nucleotides inserted at junctional positions during the joining of Vβ Dβ J segments. It is at this position that nucleic acids encoding the major Vβ binding site for a specific SAgs are inserted. This overexpression allows for more selective recognition of SAg and a lower activation threshold by a SAg that selectively binds at that site.

[0397] Nucleic acid encoding SAg receptor is amplified and transfected into T cells to overexpress the SAg receptor on the cell surface These T cells bind SAgs, and this is linked to appropriate signal transduction pathways that deliver a mitogenic signal to the T cell. One method of increasing T or NKT cell reactivity to a SAg is to increase the density of their SAg receptors. Even in the absence of ligand, the equilibrium is shifted from monomeric inactive receptors to dimeric or oligomeric active receptors. Concomitant expression of the corresponding ligand reinforces the signal. Increased numbers of receptors occur after increased transcriptional activation of, or amplification of, the SAg receptor gene. Amplification is the preferred method.

[0398] The SAg receptor may also be mutated so that it engages in ligand-independent dimerization. Examples of such mutations are addition or loss of a cysteine residue in the extracellular domain causing formation of dimeric and disulfide bonded and activated receptors. In addition it is possible to dimerize tyrosine kinases by fusing a tyrosine kinase catalytic domain to a protein which is a functional dimer. These fusion partners are able to form homodimers. Such a fusion protein results in dimerization of kinase domains which allows their autophosphorylation and activation. Interaction with receptors in a manner which promotes dimerization of two different receptors is another method to enhance receptor reactivity. The kinase domain of a receptor may be mutated to increase catalytic activity or alter substrate specificity. Such mutations expand quantitatively and qualitatively the repertoires of substrates in the target cells and thereby shift the balance towards activation and transformation. Mutations in regions involved in negative regulation of receptor function also contribute to the transforming properties. Loss of regions in the C terminus that are regulatory serine phosphorylation or autophosphorylation sites also contributes to excessive receptor activity.

[0399] Effector cells as discussed above are prepared as in Examples 4, 5, 7. They may also be used in vivo as tumor specific effector (T, NK, NKT) cells for the adoptive immunotherapy of cancer (Examples 2-5, 7, 15, 16, 18-23, 68).

### 40. SAg Nucleic Acids Fused of Cotransfected into Tumor Cell with Nucleic Acids Encoding Inducible Nitric Oxide Synthase (iNOS)

[0400] SAg-encoding nucleic acid is fused in frame (or cotransfected) with nucleic acid encoding inducible nitric oxide synthase which produces nitric oxide (NO). NO is derived from terminal guanido-nitrogen of L-arginine which is catalyzed by the constitutive or inducible nitric oxide synthase (iNOS). NO is pleiotropic and is a major cytotoxic mediator secreted by activated endothelial cells and macrophages. Production of NO is associated with apoptosis of tumorigenic cells and with a bystander effect on surrounding non-NO producing tumor cells (bystander effect). Non metastatic tumor cells show high levels of iNOS activity and NO, whereas metastatic cells do not. There is an inverse relation between production of endogenous NO and the tumor cells survivability. In the present invention, tumor cells transfected with SAg-encoding nucleic acid are cotransfected with nucleic acids encoding iNOS. The gene for iNOS has been cloned and characterized by Xie Q et al., Science 256: 225-228 (1992). Tumor cells cotransfected with nucleic acids encoding SAgs and iNOS demonstrate augmented immunogenicity via the expression of SAg as well as enhanced auto- and bystander tumoricidal capacity via NO production.

[0401] After administration to a patient and colonization of metastatic sites, the transfectants induce a powerful local and systemic tumoricidal effect. The presence of NO allows the transfectants to die naturally via auto-apoptosis within a finite period (usually 72 hours) after administration thus minimizing the risk of inducing active metastatic disease. These tumor cell transfectants may also be made to express oncogenes associated with the metastatic phenotype to promote localization of the cells to tumor sites in vivo. The cells may be further transformed by nucleic acid encoding angiostatin or other angiogenesis inhibitors for additional tumoricidal potency. The transfectant are prepared by methods in Example 1-3 and used as a preventative or therapeutic antitumor vaccine by methods in Example 15, 16, 18-23).

### 41. DCs, Other Accessory Cells and DC/tc Hybrids Expressing and/or Secreting SAg

[0402] Accessory' cells are necessary to generate primary antibody responses in culture. Of the various types of accessory cells, DCs are the most effective APC. DCs are a preferred accessory cell. However, the invention is not confined to DCs. Any other accessory cell type may be used in place of DCs. In particular, accessory cells are defined in Oxford's Dictionary of Biochemistry and Molecular Biology as including fibroblasts, synoviocytes, macrophages, B cells, Langerhans cells and any other cell type which assists in producing an immune response of any kind.

[0403] DCs have exceptional capability to capture antigens, process and present antigenic peptides, migrate to lymphoid organs, and induce primary immune responses of both CD8+ and CD4+ T cells. The ability of DCs to act as potent APC in the induction of T cell responses is attributed to the high expression of MHC molecules and adhesion and/or costimulatory molecules as well as the cells' capacity for to producing cytokines essential for the activation and proliferation of the T cells.

[0404] The number of molecules of antigen-MHC complex on tumor (and infected) cells is typically small (100 per cell), and are recognized by rare T-cell clones (at a frequency 1/100,000) via a TCR that has a low affinity (1 M). In vitro or in vivo, only a few DCs are necessary to provoke a strong T-cell response. In the mixed leukocyte reaction, one DC was sufficient to stimulate 100-3,000 T cells. MHC products and MHC-peptide complexes are 10-100 times higher on DCs than on other APCs such as B cells and monocytes. Mature DCs resist the suppressive effect of IL-10, but synthesize high levels of IL-12 that enhances both innate (NK cell) and acquired (B and T cell) immunity. DCs also express many accessory molecules that interact with various molecules or receptors on T cells to enhance adhesion and signalling (co-stimulation): examples of such pairs are LFA-3/CD58, ICAM-1/CD54, B7-2/CD86. Tumor cells that express the B7 gene elicit CTLs against otherwise silent, subdominant tumor antigens. All these properties of DCs (MHC expression, CD1 expression, secretion of IL-12 and the expression of co-stimulatory molecules) are upregulated within a day of exposure to many stresses and “dangers” including microbial products.

[0405] Infected cells and tumors frequently lack the costimulatory molecules that drive clonal expansion of T cells, the production of cytokines, and T cell development into killer cells. Located in most tissues, DCs overcome challenges by capturing and processing antigens, and displaying large amounts of MHC-peptide complexes on their surface. They upregulate their co-stimulatory molecules and migrate to lymphoid organs, the spleen and draining lymph nodes, where they activate antigen-specific T cells. All of these activities of DCs can be induced by infectious agents and inflammatory products, so that DCs appear to function as “mobile sentinels” that not only bring antigens to T cells but also stimulate those T cells in the induction of immunity.

[0406] DCs are present in most tissues in a so-called “immature” state, unable to stimulate T cells. Although these DCs lack the requisite accessory signals for T-cell activation, such as CD40, CD54 and CD86, they are well equipped to capture antigens, a key event in the induction of immunity; the antigen is then able to induce full maturation and mobilization of the DCs. Terminally-differentiated or mature DCs can readily prime T cells Once activated by DCs, these T cells can complete the immune response by interacting with B cells for antibody formation, macrophages for cytokine release, and target cells resulting in lysis. Thus, immature DCs first handle antigens and then, as mature DCs a day or more later, they potently stimulate T cells.

[0407] DCs stimulate CTLs, which express the accessory molecule CD8 and interact with MHC class I bearing cells, to proliferate vigorously. In the presence of mature DCs and of IL-12, CD4-expressing T-helper cells turn into interferon gamma (IFN)-producing TH-1 cells. IFN activates the antimicrobial activities of macrophages and, together with IL-12, promotes the differentiation of T cells into killer cells (CTL). The capacity of DCs to produce IL-12 and stimulate TH-1 cells leads to microbial resistance. Through IL-4, DCs induce T cells to differentiate into TH-2 cells which secrete IL-5 and IL-4, activate eosinophils and help B cells generate an antibody response, respectively. DCs respond to T cells as well. CD40 and the newly described TRANCE/RANK receptor on DCs are ligated by the TNF (tumor-necrosis factor) family of proteins expressed on activated and memory T cells; this leads to increased DC survival and, in the case of CD40, upregulation of CD80 and CD86, secretion of IL-2 and release of chemokines such as IL-8 and MIP-1a and b

[0408] Immature DCs capture antigen (and particles and microbes in general) by phagocytosis They then form large pinocytic vesicles in which extracellular fluid and solutes are sampled, a process called macropinocytosis. Finally, they express receptors that mediate adsorptive endocytosis, including C-type lectin receptors like the macrophage mannose receptor and DEC-205, as well as Fc, located in most tissues, and Fc receptors. Macropinocytosis and receptor-mediated antigen uptake make antigen presentation so efficient that picomolar and nanomolar concentrations of antigen suffice, much less than the micromolar levels typically employed by other APCs. However, once the DC has captured an antigen, which also provides signals to mature, its ability to capture antigens rapidly declines, and the cell begins to assemble antigen-MHC class II complexes.

[0409] An antigen enters the endocytic pathway of the DC. DCs produce large amounts of MHC class II-peptide complexes due to specialized, MHC class II-rich compartments (MIICs) that abound in immature DCs. MIICs are late-endosomal structures that contain the HLA-DM or II-2M products, which enhance and perform editing functions in the binding of peptide to MHC class II. During maturation of DCs, MIICs convert to non-lysosomal vesicles that discharge their MHC peptide complexes to the surface.

[0410] To generate cytotoxic killer cells, able to eliminate infected cells, and attack tumor cells and transplanted foreign cells, DCs must present peptides (complexed generally to MHC class I proteins) to CD8+ T cells. Display of peptide-loaded MHC class I complexes on the DC surface follows translocation by a peptide transporter from the cytosol to the ER, where complexing occurs and then to the surface.

[0411] Human DCs are characterized by a pattern of surface markers and have the phenotype CD1a+, CD3^{neg}, CD4^{neg}, CD8^{neg} CD20^{neg}, CD40+ CD86+ in the human. The murine phenotype is and CD3^{neg} CD4^{neg}, CD28^{neg}, CD8-B220^{neg}, CD40+, CD80+ and CD36+.

[0412] Maturation of DCs is required for the initiation of an immune response. Microbial products including whole bacteria and the bacterial cell-wall component LPS and inflammatory mediators such as IL-1, GM-CSF and TNF, stimulate DC maturation, whereas IL10 blocks it. Ceramide, which is induced by maturation signals, shuts down antigen uptake by the DC. Mature DCs express high levels of the NFκB family of transcriptional control proteins (RelA/p65, RelB, RelC, p50, p52) which regulate the expression of many gene encoding immune and inflammatory proteins. Signalling through the TNF-receptor family, for example TNF-R (CD-120a/b), CD40, and TRANCE/RANK, results in activation of NFκB. Therefore, to induce an immune response through activation of DCs, a pathogen or antigen may have to mobilize the signal transduction pathways of the TNF-R family and TNF-R-associated factors (TRAFs).

[0413] One explanation for the failure of the immune system to eradicate most immunogenic tumors is the lack of tumor antigen presentation by DCs in vivo.

[0414] Several strategies using tumor antigen-charged DCs as vaccines for cancer immunotherapy have been developed. Immunization with DCs pulsed with purified tumor-associated peptides or proteins has been shown to be a powerful method of priming tumor-reactive T cells and inducing host protective and therapeutic antitumor immunity in mice and man. However, such a clinical approach is currently limited due to the paucity of identified human tumor rejection antigens. The polymorphism of the HLA system has also made it difficult to identify tumor-associated peptides as cancer vaccines. In human melanoma, a class of tumor-associated proteins has been identified. However, it is unclear which antigen is the best choice for effective tumor rejection in vivo or how effective any such antigen may be. Thus, immunization with defined tumor antigens is currently limited to a small number of cancers in which candidate antigens have been identified. Anichini et al, J. Immunol. 156:208-217 (1996), showed that the majority of CTL present in HLA-A2.1+ melanoma patients were not directed to the known tumor antigens, Melan-A/Mart-1, tyrosinase, gp100 or MAGE-3. Therefore, immunization with other, yet unidentified, antigens would be more effective in eliciting tumor immunity in these patients. Johnston et al., J. Exp. Med. 183:791-800 (1996) demonstrated that the enhanced immunogenicity of tumor cells engineered to express the B7-1 gene was a result of expansion of the antigenic repertoire of the tumor. This implies that vaccination with multiple tumor antigens may be superior to use of a single dominant epitope. Indeed, in situations where a tumor-associated antigen remains unidentified, a novel approach is needed for presentation of that antigen by a professional APC.

[0415] An alternative approach, not encumbered by these limitations, is to use unfractionated tumor peptides or tumor proteins as a source of tumor antigens. Two studies have shown that administration to mice of APC (from the spleen) or epidermal Langerhans cells pulsed with tumor fragments resulted in protective immunity against tumor challenge. Zitvogel et al., J. Exp. Med. 183:87-97 (1996) showed that vaccination of mice with bone marrow-derived DC pulsed with unfractionated tumor peptides reduced the growth of subcutaneously established, weakly immunogenic tumors. Thus, immunization with multiple tumor antigens may be superior to use of a single dominant epitope.

[0416] One approach to overcome the possible drawbacks of unfractionated tumor antigens is to use mRNA from tumor cells as a “source” of antigen. mRNA can be amplified from a very small number of cells, permitting the generation of sufficient amounts of antigen from minute amounts of tumor tissue Moreover, tumor-specific mRNA can be enriched by subtractive hybridization to remove RNA that is common to normal tissue. This increases the levels of the relevant tumor-specific antigen(s) that can be achieved, and hence, the potency of the vaccine. More importantly, this approach reduces the concentration of nonspecific antigens or, possibly, self-antigens, thereby lessening the potential for autoimmunity. Pulsing DCs with RNA is known to be effective in empowering them to induce CTL responses and tumor immunity.

[0417] The fusion of tumor cells with DCs is another approach to generate a hybrid vaccine that has both potent antigen processing/presenting power along with the endogenous expression of multiple tumor antigens. Such a hybrid cell would be more effective in inducing antitumor immunity. Gong et al., Proc. Natl. Acad. Sci USA 26:6279-6283 (1998), demonstrated that fusion of a relatively immunogenic mouse tumor, MC38 carcinoma, with syngeneic DCs resulted in a vaccine that induced (1) T cell protective immunity against tumor challenge and (2) rejection of an established tumor. Wang et al., J. Immunol. 161:5516-5524 (1998) used the poorly immunogenic B16 (B16.F10) melanoma which does not express MHC and costimulatory molecules. Immunization with irradiated B16 tumor cells failed to induce systemic immunity or elicit functional tumor-reactive T cells. RMA-S is a Rauscher MuLV-induced T cell lymphoma originating in a C57BL/6 (“B6”) mouse that is genetically defective in TAP, and thus, does not process endogenous antigens for binding to MHC. Fusion of DCs with syngeneic tumor cells generated hybrid cells that expressed both DC-associated accessory molecules important for antigen presentation and tumor-derived antigens. The DC/tc hybrids were processed and presented tumor-associated antigens and elicited tumor-reactive CTLs. Vaccination of B6 mice with B16/DC hybrid cells induced partial protective immunity against tumor challenge. Immunization with B16/DC or RMA-S/DC hybrid cell vaccines primed lymph node (LN) T cells, which, after expansion ex vivo, were active in adoptive immunotherapy. The transfer of such vaccine-primed, expanded T cells into tumor-bearing mice reduced the number of established B16 pulmonary metastases and, in the case of RMA-S/DC, effectively eradicated disseminated FBL-3 tumor.

[0418] The present invention includes a hybrid cell made from fusion of a tumor cell and a DC cell further transformed or transfected with a SAg. Nucleic acids encoding SAgs may be introduced into either the tumor cells or the DCs prior to fusion as in Example 1, 2, 3, 25, 26. This fused cells are prepared as in Example 24, 25 and their phenotype established by the retention of DC characteristics, tumor cell antigens and the expression of SAg (Example 25). By virtue of these multiple features, this SAg-expressing DC/tc has the unique capacity activate maximally an anti-tumor immune response.

[0419] SAg stimulation is known to activate CD4+ and CD8+ T cells to recognize and lyse tumors specifically both in vitro and in vivo. The DC component of the hybrid cell provides optimal tumor antigen presentation due to its enormous surface area together with natural expression of costimulatory molecules B7.1, B7,2, adhesion molecules ICAM-1 and ICAM-3, MHC class I and class II and CD1 receptors. B7.1, in particular, provides a basis for expanding the epitope recognition spectrum from dominant to subdominant epitopes. The expressed SAg confers upon the hybrid cell an augmented capacity to activate various classes of cells that mediate both innate and “acquired” or adaptive immunity, including CD4+ and CD8+ T cells, NK cells and NKT. The SAg also contributes to generation of TH-1 cytokines by this class of T helper cells which contributes to an optimal anti-tumor response. The DC/tc hybrid that expresses and/or secretes SAg is abbreviated herein as an “S/D/t” cell and combines the potent activating properties of SAg with the specialized (tumor) antigen presenting capacity of the DC and the tumor antigens provided endogenously by the tumor cell partner. This S/D/t cell thus consolidates in a single cell the capacity to unleash and amplify the full weight of the host immune response specifically against a selected array of tumor associated antigens.

[0420] The present invention also includes the additional introduction, into the S/D/t cell of with additional nucleic acids. In one embodiment, the additional nucleic acid encodes the particular galactosyltransferase enzyme that catalyze the synthesis of the “heterograft epitope” Gal. In another embodiment, the additional nucleic acid encodes enzymes that synthesize galactosylceramide which is the “natural” epitope recognized by the invariant chain of NKT cells.

[0421] To summarize the foregoing section, the present invention includes DCs, other accessory cells or hybrid DC/tc, each transformed to express SAgs as described in Examples 1 and 3. The transformed (or transfected) hybrid cell, the S/D/t cell, expresses (1) the major accessory molecules of DCs cells (such as CD40, CD80 and CD86, MHC class I and II and CD1); (2) tumor associated epitopes provided by the tumor cell fusion partner; and (3) SAg either membrane bound, secreted or both which activates T cells, NK cells and NKT cells to produce a specific or selective tumoricidal response.

[0422] While the tumor S/D/t cells are preferred, SAg-transfected DCs or other accessory cells are also effective in inducing antitumor responses. These are used as a preventative or therapeutic antitumor vaccine, or ex vivo to stimulate a population of T cells, NK cells or NKT cells for adoptive therapy of cancer (Examples 29).

### 42. DCs Expressing SAg and Tumor Associated Antigens—Production by Processing of Apoptotic Tumor Cells or Tumor Cell Lysates

[0423] DCs expressing SAg and tumor associated antigens are prepared without cell fusion (Example 28). Apoptotic, SAg transfected tumor cells are prepared by first transfecting tumor cells with SAg (Example 1) and then inducing apoptosis by irradiation or other methods well known in the art (Example 28). DCs express αᵥβ₅-binding integrins and secrete thrombospondin which ligates vitronectin expressed on the surface of the apoptotic tumor cell. DC surface CD36 binds to its natural ligand, sequestrin, also expressed on apoptotic tumor cells. The apoptotic SAg-expressing tumor cells are phagocytosed and processed by DCs under conditions described in Example 28.

[0424] In another embodiment, lysates of tumor cells optionally expressing SAg are also used as above. Tumor cells are first transformed to express SAg and then lysed (Example 28. These lysates are “fed” top DCs as in Example 28. DCs treated in this way can now present tumor-associated antigens along with SAg to the immune system. Alternatively, DCs are first transformed to express SAg, and these cells are allowed to phagocytose or process apoptotic tumor cells or lysates. Optionally the tumor cells may have been previously genetically modified with nucleic acids so that they synthesize β1,3-glucan, LPS, peptidoglycan or Gal Cer.

[0425] The resulting SAg-expressing DC, after phagocytosing apoptotic tumor cells or Iysates, expresses MHC class II, costimulatory molecules CD40, CD80 and CD86, together with SAg and tumor associated antigen. The additional expression of SAg in this system permits more potent activation of T cells, NKT cells and NK cells which recognize the tumor associated antigens expressed on the DC surface in the context of MHC and costimulatory molecules.

[0426] In another embodiment, tumor cells are fused to mammalian cells including but not limited to proximal tubular epithelial cells, other kidney cells including the Madin-Darby canine kidney (MDCK) cell line which express an abundance of alpha anomeric digalactosylceramides which are natural superantigen receptors. In an additional embodiment, tumor cells are fused to cells including but not limited to amphibian intestinal cells which express a high level of phytosphingosine (see Example 25 for cell fusion methodology). The resulting hybrid cells express tumor associated antigens and either galactosylceramides or phytosphingosine. Alternatively, exogenous galactosylceramide or phytosphingosine from the cell membranes of the above kidney or amphibian cells are incorporated into intact tumor cells by methods given in Section 38 and Example 5. These hybrid tumor cells or tumor cells with newly acquired membrane glyco- or phytolipids (TCGP) are further transfected with superantigen nucleic acids to produce hybrid tumor cells or TCGP expressing superantigens, tumor associated antigens, galactosylceramides and/or phytosphingosine (Example 1). These hybrid tumor cells or TCGP are potent activators of T cell, NK cell and NKT cells

[0427] The DCs, hybrid tumor cells, or TCGP given above are used in a preventative or therapeutic antitumor vaccine (Example 29) or ex vivo to activate tumor specific effector cells, T cells, γ/δT cells, NKT cells, NK cells for the adoptive immunotherapy (Example 29).

### 43. DCs Expressing or Secreting SAg Cotransfected with a Tumor Associated Antigen or “String of Beads” Tumor Antigens

[0428] When a dominant tumor associated antigen (protein) is known, nucleic acid encoding such an antigen are used to transform DCs which already express or secrete SAg (Example 35). Antigens identified by “SELEX” technology which consists of nucleic acids encoding tumor antigens from distinct structural and functional categories of human tumor associated antigens, including mutants, differentiation variants, splice variants, amplified/overexpressed antigens or retroviral antigens may be used. Nucleic acids encoding tumor antigens used to transfect SAg-expressing DCs or DC/tc hybrids. This invention contemplates transfecting with individual nucleic acids encoding a single antigen, or multiples as in a “string of beads” carried by adenoviral or other vectors known in the art (Example 35). Nucleic acids encoding a “string of beads” or tumor associated antigens identified by SELEX may be fused in frame (or cotransfected with) SAg-encoding nucleic acid into DCs or DC/tc. These SAg- and tumor antigen-expressing DCs or DC/tc hybrids are used as a preventative or therapeutic antitumor vaccines (Example 29) or as stimulators ex vivo of T cells, NKT cells or NK cells for adoptive immunotherapy (Example 29).

[0429] Furthermore, nucleic acids encoding proteins listed in Tables I, II, IV and V, for example, angiostatin, protein A, erb/Neu and HSPs, staphylococcal collagen adhesin, are introduced into and expressed in tumor cells or DCs that express or secrete SAg, or into S/D/t cells. These cells that coexpressing the proteins and peptides of Tables I, II, IV and V together with SAg are useful as preventative or therapeutic antitumor vaccines (Example 29) or as stimulators ex vivo that activate tumor specific effector cells (T cells, γ/δT cells, NKT cells, NK cells) for adoptive immunotherapy (Example 29, 68).

### 44. Naked DNA or RNA Obtained from the Various Cells Described Above that Express and/or Secrete SAg

[0430] DNA containing the CpG backbone is extracted from tumor cells or DCs that express/secrete SAgs or S/D/t cells (Example 30-34). The preferred source of DNA or RNA is the S/D/t cells DCs or tumor cells expressing SAg are also useful. Alternatively, the DNA or RNA can be obtained from DCs, tumor cells or DC/tc into which SAgs were introduced by the cells having phagocytosed SAg-transformed apoptotic tumor cells or tumor cell lysates.

[0431] The extracted DNA or RNA is used as a naked DNA or RNA preventative or therapeutic vaccine (Examples 30-34). Alternatively, this nucleic acid material may be used ex vivo to activate T cell, NKT cells or NK cells adoptive immunotherapy (Example 1, 31, 33). This extracted DNA or RNA may be used in an initial step of inducing immune reactivity in regional lymph nodes of tumor bearing subjects. After this “priming,” T cells, NKT cells and/or NK cells are harvested from these lymph nodes, expanded in culture in the presence of additional SAg, SAg-expressing DC or tumor cells, or S/D/t cells to generate a T cell, NKT cell or NK cell population for adoptive immunotherapy (Examples 29).

[0432] DNA or RNA for immunization may also be obtained from the various cells described above that express SAg, and which additionally express or several Staphylococcal adhesins, β-glucans, LPS, peptidoglycans, teichoic acids, mannose, mannan, protein A and/or their respective binding proteins.

[0433] Also useful for naked nucleic acid immunization are bacterial or insect nucleic acids (with CpG motifs) which encode enzymes that catalyze the biosynthesis of β-1,3-glucans, LPS, peptidoglycan, α-gal, GalCer, teichoic acids, mannan or mannose. Also useful are bacterial or insect nucleic acids that encode the binding proteins for the above carbohydrate-based molecules, glycoprotein lectins that bind the carbohydrate structures, or protein A. Such nucleic acids are used to co-immunize along with SAg expressing DCs or tumor cells or S/D/t cells. Such combined vaccine preparations are used as a preventative or therapeutic antitumor vaccines (Examples 29, 30). Alternatively, they may be used to initiate adoptive T cell therapy by priming regional lymph nodes T cells which are harvested, expanded in vitro by stimulation with S/D/t cells, accompanied by, or followed with IL-2. The tumor antigen-sensitized T cells are reinfused into subjects as described in Example 29.

### 45. Exosomes Derived from (1) SAg-Expressing Tumor Cells (2) SAg Expressing-DCs (3) S/D/t Cells or (4) DC/tc Hybrid Cells

[0434] MHC-peptide complexes accumulate in endosomes and lysosomes, which compartments contain MHC class II-enriched internal vesicles that are released outside the cell following direct fusion of the external endosomal membrane with the plasma membrane. These vesicles, termed “exosomes” are capable of stimulating CD4+ T cell clones in vitro. In addition, tumor peptide-pulsed DC-derived exosomes prime specific CTLs in vivo leading to a T cell-dependent eradication or suppressed growth of established murine tumors. In the present invention, the exosomes which have SAgs in addition to tumor associated antigens and MHC class I and class II molecules are prepared. Such preparations are significantly more potent in their ability to induce shrinkage of established tumors and prevent tumor outgrowth.

[0435] Exosomes are prepared from (1) tumor cells or DCs which have been transfected with SAgs (2) S/D/t cells, (3) DCs or hybrid DC/tc which have phagocytosed SAg-expressing apoptotic tumor cells or tumor cell lysates (Example 36). In the above hybrids, either the DC or tumor cell may be transfacted with SAg encoding nucleic acid prior to fusion. The resulting exosomes express MHC class I and class II molecules, SAgs and tumor associated antigen. In order to ensure the routing of the transforming SAg to exosomes, the SAg-encoding nucleic acid should include a sorting signal to localize the SAg to the exosome. These cells may be pulsed with tumor associated antigens shortly before isolation of their exosomes. The isolated exosomes are used as preventative or therapeutic antitumor vaccines (Example 36) or as stimulators ex vivo that activate tumor specific effector cells (T cells, γ/δT cells, NKT cells, NK cells) for adoptive immunotherapy (Example 36). These various exosome preparations are extremely effective inducers of anti-tumor responses.

### 46. Cell Surface Display of Recombinant SAg and Tumor Associated Antigens in Bacteria

[0436] Heterologous proteins and various carbohydrate-containing moieties, displayed on the surface of bacterial cells often act as major antigenic systems that stimulate anti-tumor immunity. Such antigens include GalCer, α-gal, β1,3-glucans, LPS, peptidoglycans, teichoic acids and mannan. These structures will be referred to below collectively as “anti-tumor motifs.” These structures are created by the action of enzymes encoded by a number of bacterial and fungal genes. For example, Sphingomonas paucimobilis expresses GalCer, or Klebsiella aerobacter expresses -Gal and LPS, and Cryptococcus expresses β1,3-glucan. Because not all the genes responsible for the biosynthesis of these molecules have not been identified, it is difficult to isolate them and introduce them into mammalian cells. These structures are, however, biosynthesized in abundance by bacteria. Immunization with live recombinant bacteria induces both local and systemic immune responses suggesting that gram-positive bacteria might constitute potential live bacterial vaccine delivery systems. The surface molecules of gram-positive bacteria seem to be more permissive for the insertion of extended sequences of foreign proteins than are gram-negative bacteria, in which both translocation through the cytoplasmic membrane and correct integration into the outer membrane are required for proper surface exposure.

[0437] In the present invention, different bacterial surface display systems are used to express natural anti-tumor motifs for developing live bacterial vaccine vehicles. SAgs are provided to bacteria which do not naturally biosynthesize them so that they are expressed together with natural anti-tumor motifs made in the bacteria. These bacteria are then used as preventive or therapeutic antitumor vaccines (Example 28).

[0438] Sphingomonas paucimobilis bacteria express GalCer which can activate the V14 invariant chain expressed by NKT cells. These cells recognizes the galactosylceramide epitope. NK cells, using their NKP1-1 receptors, recognize carbohydrate units such as 1b,3-glucans expressed widely on fungi. NK cells are activated directly by SAgs. Further proliferation is induced by interferon produced by T cells in response to the SAg. Humans have natural antibodies specific for the αGal epitope. This epitope is constitutively expressed on several bacteria including Klebsiella aerobacter and E. coli.

[0439] Coexpression of SAg with the above anti-tumor motifs in recombinant bacteria or fungi provides potent signals to activate NKT cells, T cells and NK cells and to induce production of TH-1 cytokines. The adhesion molecule VCAM-1 expressed by some SAgs such as enterotoxin C contributes to the process by costimulation. Therefore, the SAg expressing bacteria (whether natural or transformed) are capable of activating all of the major cell types involved in the anti-tumor response.

[0440] In the present approach, the preferred SAg is SEB. SEB is introduced for surface display into S. carnosus. E. coli-staphylococcus shuttle vectors are constructed by taking advantage of (1) the promoter signal sequence and propeptide region from the lipase gene construct derived from S. hyicus and (2) the cell surface attachment part of staphylococcal protein A. A 198-amino-acid region, designated ABP (albumin binding protein), is expressed adjacent to the cell wall to increase accessibility to the surface-displayed target peptides. Staphylococcal enterotoxin B is introduced between the lipase propeptide and the ABP region and the surface exposure of the three different regions are tested separately with different assays.

[0441] These recombinant bacteria are useful as a preventative or therapeutic antitumor vaccine (Example 28) or as stimulators ex vivo of tumor specific effector cells (T cells, γ/δT cells, NKT cells, NK cells) for adoptive immunotherapy (Example 28, 68).

### 47. Introduction of Staphylococcal Collagen Binding Adhesins into DCs, Tumor Cells or S/D/t Cells

[0442] Nucleic acids encoding SAgs are transfected into these various cells, as described above, together with nucleic acids encoding Staphylococcal collagen adhesin. Mice immunized with a recombinant fragment of the collagen adhesin were protected against Staphylococcus aureus-mediated septic death. Sera from S. aureus-immunized mice promoted phagocytic uptake (opsonized) and enhanced intracellular killing of the bacteria compared to sera from control mice.

[0443] The collagen binding adhesin is isolated from S. aureus strain Cowan. Sequencing of the cloned corresponding gene cna revealed a 133-kDa polypeptide (close to that of 135 kDa reported for the native protein). This protein is proposed to consist of a signal sequence (S) followed by a large nonrepetitive region (A). Immediately following the A region are three consecutive repeats of a 167 amino acid long unit (B1, B2, B3). A cell wall (W) region consisting of 64 amino acid proline-and lysine-rich domain is followed by stretch of hydrophobic amino acids (M), presumably constituting the cell membrane spanning region. Finally, the C-terminus (C) is made up of a few positively charged amino acids. This model structure is used as the starting point to identify the collagen binding domain. The ligand binding site is localized within the 135-kDa S. aureus collagen adhesin. The collagen binding domain is localized to a 168 amino acid long segment [CBD (151-318)] within the N-terminal portion of the adhesin.

[0444] Using biospecific interaction analysis, bovine collagen was found to contain eight binding sites for CBD (151-318), two of which were high affinity and six low affinity. The deduced amino acid sequence of the ligand binding domain of the collagen adhesin is presented. Subsequently a discrete collagen-binding domain within the collagen adhesin was identified and localized to a region between amino acids Asp209 and Tyr233. The FDA strain 574 of S. aureus encodes a 1185 amino acid collagen adhesin. The complete nucleotide sequence of the cna gene as well as a schematic model of the collagen adhesin have been published. The overall structure resembles that of other gram positive surface structures. The lysine and proline rich hydrophilic region which follows the repeated domains resembles a structure in protein A, staphylococcal fibronectin receptor and streptococcal protein G and M proteins. Also present is the hexapeptide LPKTGM which is similar to the consensus sequence LPXTGE which is conserved among other gram positive surface proteins. The hydrophilic region is thought to mediate the binding of the protein to the cell wall. The presence of hydrophobic amino acids which may traverse the membrane followed by a C-terminal cluster of positively charged residues, possibly located on the cytoplasmic side of the membrane, is characteristic of staphylococcal cell surface proteins.

[0445] In the collagen adhesin, a 29 amino acid signal peptide at the N-terminus is followed by a large nonrepetitive A domain, and the highly homologous domains B1, B2 and B3 (probably a result of a series of stepwise gene duplication events). Collagen binding receptors have been found on other species of bacteria such as the 75× adhesin of uropathogenic E. coli. Type 3 fimbrias from pathogenic enteric bacteria, some species of oral streptococci, Streptococcus pyogenes, Yersinia and Treponema pallidium have all been reported to bind various forms of collagen. Thus the collagen binding appears to be a common modality used by pathogenic bacteria of a diverse group to adhere selectively to host tissues and form a focus of infection.

[0446] Nucleic acids encoding staphylococcus collagen adhesin are introduced into SAg-expressing tumor cells or DCs, or S/D/t cells. The cells co-expressing the staphylococcal collagen adhesin with SAgs are useful as a preventative or therapeutic antitumor vaccines (Example 28) or as stimulators ex vivo that activate tumor specific effector cells (T cells, γ/δT cells, NKT cells or NK cells) for adoptive immunotherapy (Example 28, 68).

### 48. Co-Expression of Anti-Tumor Motifs or their Binding Proteins with SAg

[0447] Tumor cells or DCs expressing SAgs, or S/D/t cells, are transformed with nucleic acids encoding enzymes that catalyze the biosynthesis of anti-tumor motifs, including the α-gal epitope, the GalCer epitope, β-1,3-glucans, LPS, peptidoglycan, teichoic acids or a protein or peptide such as Staphylococcal adhesins, protein A, and/or the binding proteins for the above motifs or proteins. Transformation may be achieve using bacterial plasmids or nucleic acids integrated into an appropriate viral vector. These antigenic structures are fundamental units recognized in the primitive host defense mechanisms (“innate immunity”) of invertebrates, but also evoke responses in mammalian immune systems via the TOLL and NFκB systems.

[0448] DNA encoding the galactosyltransferase that synthesizes the saccharide structure containing the αGal epitope, and gene clusters encoding the biosynthetic pathway for LPS are described in Schnaitman C A, et al., Microbiol. Rev. 57: 655-682 (1993). DNA is extracted from bacteria which biosynthesize these molecules and used to transfect DCs, tumor cells, or S/D/t cells For creation of the GalCer structure, the source of DNA is Sphingomonas paucimobilis organisms. Nucleic acids encoding the pathways for biosynthesis of β-1,3-glucans, peptidoglycans, and protein A have been cloned from insects and Staphylococcus aureus, respectively. These nucleic acids are cloned into suitable expression vectors and introduced into the target cells. Resulting S/D/t cells thus express SAg as well as the anti-tumor motif structure.

[0449] S/D/t cells that co-express Gal can interact with and stimulate NKT cells through the Va14 invariant chain which naturally recognizes the -galactosylceramide epitope. NK cells, via their NKP1-1 receptors, will recognize carbohydrate units such as β-1,3-glucans on the S/D/t cells. The co-expressed SAg induces further NKT cell expansion. The SAg is also capable of inducing massive proliferation of conventional T cells which can be further promoted by the co-expression of B7-1, B7-2 and ICAM-1 which are normally expressed on DCs. VCAM-1, expressed by some SAgs such as enterotoxin C, also is capable of contributing to this stimulation. As indicated above, NK cells are activated directly or indirectly by T-cell derived interferon.

[0450] The S/D/t cells (as well as tumor cells or DCs expressing SAg) that also express one or more of the anti-tumor motifs are capable of activating all of the major cell types involved in anti-tumor immunity: T cells specific for peptides, NKT cells reactive with lipoproteins and glycosylceramides and NK cells that recognize for oligosaccharides. These cells are useful as preventative or therapeutic antitumor vaccines (Examples 29) or as stimulators ex vivo that activate tumor specific effector cells (T cells, γ/δT cells, NKT cells or NK cells) for adoptive immunotherapy (Example 29).

### 49. SAgs Combined with Low Density Lipoproteins (LDL), Oxidized LDL (oxy LDL) Oxidized LDL Mimics and Apolipoproteins

[0451] In the present invention, low density lipoproteins (collectively LDL) intermediate density LDL (IDL), chylomicrons, very low density lipoproteins (VLDL), oxidized LDL (oxyLDL), oxyLDL mimics as well as and apolipoproteins including but not limited to apolipoprotein (a), B100 and E4 are conjugated to superantigens and are useful as anti-cancer agents alone.

[0452] LDLs, oxyLDLs and apolipoproteins are physically trapped or bind to receptors expressed in the dense network of randomly branching blood vessels and sinusoids of the tumor neovasculature and have the capacity to deposit or bind to LDL receptors on the tumor endothelium and to scavenger receptors on macrophages OxyLDL or apolipoproteins bound to tumor endothelium or macrophages they induce apoptosis or they promote inflammation by activating vascular cells and macrophages to generate cytokines, chemoattractants and tissue factor.

[0453] Superantigens in nucleic acid or polypeptide form are conjugated to the lipoproteins and amplify the inflammatory effect of the lipoproteins by inducing apoptosis of endothelial cells, upregulating endothelial cell integrins, adhesins and procoagulant activity while activating macrophages and immunocytes. Any tumor which is neovascularized is eligible for this therapy. These conjugates therefore have the advantages of localizing to disseminated and neovascularized tumor, inducing apoptosis and initiating a powerful anti-tumor response.

[0454] Lipoproteins

[0455] Lipoproteins are globular particles of high molecular weight that transport nonpolar lipids (primarily triglycerides and cholesterol esters) through the plasma. Lipoproteins have been classified on the basis of their densities into five major classes: chylomicrons, very low density lipoproteins (VLDL), intermediate-density lipoproteins (IDL), low-density lipoproteins (LDL), and high-density lipoproteins (HDL). The physical-chemical characteristics of the major lipoprotein classes are presented in Table The core of the spherical lipoprotein particle is composed of two nonpolar lipids hydrophobic lipids, triglyceride and cholesteryl ester, which are present in different lipoproteins in varying amounts. This hydrophobic core accounts for most of the mass of the particle, and consists of triglycerides and cholesterol esters in varying proportions. Surrounding the core is a polar surface coat of phospholipids that stabilize the lipoprotein particle so that it can remain in solution in the plasma. Variable amounts of unesterified cholesterol are interdigitated with the phospholipids of the surface coat. In addition to phospholipid, the polar coat contains small amounts of unesterified cholesterol. Each lipoprotein particle also contains specific proteins (termed apoproteins) that are exposed at the surface and extend into the core. The apoproteins bind specific enzymes or receptors on tumor microvascular cells.

[0456] Chylomicrons

[0457] Chylomicrons are large lipoprotein particles formed within intestinal epithelial cells from dietary triglycerides and cholesterol which are secreted into the intestinal lymph and pass into the general circulation where they adhere to LDL receptors on the tumor microcapillaries. Chylomicron remnants are removed by both LDL receptors and LDL-receptor related protein/alpha2-macroglobulin receptor (LRP). While bound to these endothelial surfaces, the chylomicrons are exposed to the enzyme lipoprotein lipase. The chylomicrons contain an apoprotein, apoprotein CII, that activates the lipase, liberating free fatty acids and monoglycerides.

[0458] Very Low Density Lipoprotein (VLDL)

[0459] Very low density lipoprotein (VLDL)are triglyceride rich particles which are secreted from the liver into the bloodstream after conversion of carbohydrate to glycerol-esterified fatty acids to form triglycerides. VLDL particles are relatively large, carry 5 to 10 times more triglycerides than cholesteryl esters, and contain a form of apoprotein B, designated B 100, that differs from the apoprotein B48 of chylomicrons. The VLDL particles are transported to LDL receptors on tumor microcapillaries, where they interact with the same lipoprotein lipase enzyme that catabolizes chylomicrons. VLDL also binds to the VLDL receptor via apolipoprotein E and lipoprotein lipase. Both apolipoprotein E and lipoprotein lipase are constituents of chylomicron remnants which are a physiological ligand for the VLDL receptor.

[0460] Plasma Apolipoproteins

[0461] Plasma apolipoproteins have a central role in plasma lipid transport. Central to the functions of all apolipoproteins (apo) is specialized regions termed amphipathic helices which have the ability to bind phospholipids. The amphipathic helices in apoA-I, apoA-II, and apoC-III comprise multiple repeats of 22 amino acids or 22-mer periodicity each consisting of a tandem array of two 11-mers which tend to begin or end with a proline. The characteristic spatial arrangement of the hydrophobic and hydrophilic amino acids within the amphipathic helices is that the hydrophobic face is intercalated between the fatty acyl chains of phospholipids and the hydrophilic face is located close to the polar head groups of phospholipids. Such an orientation allows the interaction of protein domains with lipoprotein-modifying enzymes and cellular receptors that control the catabolism of lipoproteins (Lp) and their removal from the circulation. The major apolipoproteins useful in the present superantigen-apolipoprotein conjugates are as follows:

[0462] Apolipoprotein (a)

[0463] Apolipoprotein (a) (Lp (a)) is made by hepatocytes and is secreted into plasma where it forms a covalent linkage by a single interchain disulfide bond to a unique multikringle glycoprotein, with apo B 100 of LDL to form lipoprotein(a). called apolipoprotein(a). Protein apo (a) has structural similarities to plasminogen and consists of multiple bent repeats of amino acid sequences. Apolipoprotein (a) exists in polymorphs distinguished by molecular weights. The molecular basis for the size variation of apo[a] is primarily due to multiple apo[a] alleles that differ in the number of kringle type 2 (plasminogen kringle type 4) repeats. Minor variability in apo(a) size might be due to differences in glycosylation, as carbohydrates make up 25-40% of the apo (a) weight.

[0464] A close structural similarity exists between apo(a) and plasminogen a protease zymogen whose active form cleaves fibrin to dissolve blood clots, is activated by tissue and urokinase plasminogen activators via cleavage at a specific arginine residue. Indeed, in-vitro and ex-vivo studies have shown that apo(a) binds to immobilized fibrin (fibrinogen), to the plasminogen receptor on endothelial cells and competes with tissue plasminogen activator in converting plasminogen to plasmin. Lipoprotein(a) also competes with plasminogen for its high-affinity binding sites in endothelium, platelets, and macrophages. Because of structural homology with plasminogen apo(a)I competitively inhibits fibrin-dependent activation of plasminogen to plasmin and plasmin-mediated activation of cytokine transforming growth factor-b. Hence, Lp(a) is capable of interfering with the fibrinolytic process by acting as a procoagulant. The colocalization of apo(a) with fibrin (fibrinogen) in the arterial wall further suggests that Lp(a) is thrombogenic.

[0465] Lp(a) is a poor ligand for the LDL receptor and is consequently taken up and degraded by unregulated mechanisms, leading to tissue accumulation. Lp(a) is targeted to uptake by macrophages, presumably through the scavenger-receptor pathway. Owing to the lower β-carotene content, Lp(a) may be more easily oxidized than LDL. Oxidized Lp(a) such as Lp(a) modified by malondialdehyde, a product generated in vivo from aggregated platelets, is avidly taken up by monocyte-macrophages. through the scavenger-receptor pathway. Lp(a) accumulates in either the arterial wall and in vein grafts, respectively suggesting that Lp(a) can also traverse the endothelium of arterial vessels and reach the intima by non-receptor-mediated mechanisms and that this transport process is influenced by the density/size of Lp(a). There, Lp(a) can form complexes with such tissue-matrix components as proteoglycans, glycosaminoglycans, and collagen as well as fibrin. The magnitude of the transfer of Lp(a) from the plasma compartment to the arterial wall is larger when plasma Lp(a) levels are elevated because of a gradient effect or because of a possible direct action of Lp(a) on arterial permeability.

[0466] Apolipoprotein B

[0467] Apolipoprotein B occurs in two forms termed apoB-100 and apoB-48. In humans apoB-48 is produced only by the intestine and apolipoprotein B-100 originates from the liver. Apolipoprotein B-100, which contains 4536 amino acid residues, is the major apolipoprotein of VLDL, IDL, Lp(a) and is the sole apolipoprotein of LDL. ApoB-48 consists of the amino-terminal half of apoB-100, contains 2152 amino acid residues and is devoid of binding domain for the LDL receptor.

[0468] Apolipoprotein E4

[0469] Apolipoprotein (apo) E is a 34-kCa protein coded for by a gene on chromosome 19 and plays a prominent role in the transport and metabolism of plasma cholesterol and triglyceride through its ability to interact with the low density lipoprotein (LDL) receptor and the LDL receptor related protein (LRP). Apolipoprotein E (apoE) is a 34-kda protein component of lipoproteins that mediates their binding to the low density lipoprotein (LDL) receptor and to the LDL receptor-related protein (LRP). Apolipoprotein E is a major apolipoprotein in the nervous system, where it is thought to redistribute lipoprotein cholesterol among the neurons and their supporting cells and to maintain cholesterol homeostasis. Apart from this function, apoE in the peripheral nervous system functions in the redistribution of lipids during regeneration.

[0470] Oxidized LDL

[0471] LDL is also rapidly transported across an intact endothelium and becomes trapped in the three-dimensional cage work of fibers and fibrils secreted by the artery wall cells. This concentration-dependent process does not require receptor-mediated endocytosis. LDL entrapped in arteries or bound to receptors on endothelium or the tumor microcirculation undergoes diverse enzymic and chemical modifications. It can also be introduced into the cell a variety of lipophilic invaders such as lipid peroxidation products and cholesterol oxides that may irreversibly modify cellular functions. The early oxidative modification of the trapped LDL in vivo occurs before monocytes are recruited and results in the oxidization of lipids in LDL with little change in apoB.

[0472] Monocytes recruited to the lesion, are converted into macrophages and the LDL lipids are further oxidized. Once the LDL contains fatty acid lipid peroxides, there follows (especially in the presence of metal ions) a rapid propagation that amplifies dramatically the number of free radicals and leads to extensive fragmentation of the fatty acid chains with the generation of a broad spectrum of oxysterols, shorter-chain aldehydes (e.g., malondialdehyde and 4-hydroxynonenal) some of which involve the covalent binding of short-chain substituents to the amino groups of lysine residues in apoprotein B (and possibly to other portions of the apoprotein B molecule) masking lysine 6-amino groups. Acetyl LDL and scavenger receptors recognize modifications effected by chemical acetylation and highly oxidized LDL.

[0473] Incubation of LDL with endothelial cells, smooth muscle cells, and macrophages in vitro induces oxidation of polyunsaturated fatty acids. Lipid peroxides formed fragment fatty acyl chains and attach covalently to apoB or fragments thereof, thereby rendering the modified particles competent for endocytosis by the scavenger receptor. LDL particles also undergo peroxidation of polyunsaturated fatty acids which produces oxidative modification and conversion of LDL lecithin to lysolecithin.

[0474] Modification of LDL with malondialdehyde, a product of arachidonic acid metabolism or oxidation of LDL leads to foam cell formation. Unlike native LDL, oxidized LDL is mitogenic or induces apoptosis in arterial endothelial and smooth muscle cells. It also induces endothelial cells and monocytes to express high levels of tissue factor and plasminogen activator inhibitor. Levels of P-selectin are increased intracellularly and are released by oxy-LDL which can also directly stimulate PDGF production in endothelial cells. Oxidized LDL also induce the expression of endothelin, to inhibit the expression of nitric oxide synthase, and to inhibit the resulting vasodilation. Platelet accumulation and local increases in thromboxane A, serotonin, ADP, platelet activating factor, and activated thrombin, together with a local reduction in prostacyclin further contribute to a procoagulant state.

[0475] Another stable end product of cellular oxidative modification of LDL is lysophosphatidylcholine, which is generated by phospholipase A2 hydrolysis. This lipid selectively induces the expression of adhesion molecules for monocytes, vascular cell adhesion molecule-1 (VCAM-1), and ICAM-1 in cultured human arterial endothelial cells. TNF-a activation is a prerequisite for the observed lysophosphatidylcholine induction of VCAM-1. Lysophosphatidylcholine also induces monocyte chemotaxis, arrests macrophage migration and induces macrophage proliferation through SR-A-mediated internalization of modified lipoprotein. Finally, lysophosphatidylcholine induces gene expression for smooth muscle/fibroblast growth factors, the A and B chains of PDGF, and heparin-binding epidermal growth factor-like protein in cultured endothelial cells.

[0476] Oxy LDL Mimics

[0477] The cytotoxic effects of highly oxidized LDL are mimicked by higher concentrations of oxysteroid. particularly 7β-hydroperoxycholesterol. 7β-hydroxycholesterol, 7-ketocholesterol and 5α-6α-epoxycholesterol. These oxysterols can induce apoptosis in a variety of cells. Of these end products, 73-hydroperoxy-choles-5-en-3β-ol has been identified as the primary cytotoxic in highly oxidized LDL. This molecule accounts for approximately 90% of the cytotoxicity of lipids extracted from highly oxidized LDL in vitro. Fatty acid hydroperoxides and aldehydes found in oxidized LDL also alter intracellular functions. For example, 4-hydroxynonenal (4-HNE). a component of oxidized LDL, induces binding of the coagulation protein, Factor Xa to endothelial cells. In addition, oxidized LDL and mm-LDL can significantly, induce the release of IL-1 from macrophages. Saponified Cu²+-oxidized LDL and mm-LDL have been shown to contain 9-HODE, 13-HODE, and cholesterol-9-HODE; which increase IL-1 release from macrophages. 4-HNE also causes a variety of effects on monocytes, including stimulation of monocyte migration through induction of chemoattractant proteins and initiation of apoptosis

[0478] Mildly Oxidized LDL (mm-LDL)

[0479] Mildly oxidized LDL (mm-LDL) induces elevated levels of cAMP by a G protein-mediated mechanism and induces inflammatory molecules both by increasing the rates of gene transcription and by stabilizing the mRNA for these genes. Exposure of the arterial wall to (mm-LDL) or biologically active products of lipid peroxidation results in binding to the LDL-R. mm-LDL also induces monocytes to bind to endothelial cells. and induces changes which affect monocyte binding, tethering, activation, and attachment. mm-LDL also induces an inflammatory phenotype in endothelial cells and proinflammatory cytokines accompanied by increase the levels of the transcription factor, NF kB, which has been linked to the expression of a variety of adhesion molecules. In particular, lysophosphosphatidylcholine, a product of LDL oxidation, has been shown to be a chemoattractant for monocytes and T-lymphocytes, to induce the adhesion molecules VCAM-1 and ICAM-1, and to increase levels of PDGF and heparin-binding epidermal growth factor mRNA in endothelial cells and smooth muscle cells. Increases in ICAM-1 expression lead to enhanced monocyte adhesion to the vessel wall.

[0480] Moreover, mm-LDL induces endothelial cells to produce the potent monocyte activators monocyte chemoattractant protein 1 (MCP-1) and monocyte colony stimulating factor (M-CSF). Macrophage Class A scavenger receptors and CD36, a Class B scavenger receptor are up-regulated by M-CSF. Once bound to specific scavenger receptors, mm-LDL can initiate cell signaling events in vascular cells stimulating phosphoinositide metabolism and calcium flux as well as stimulate phospholipase E1 activity through a tyrosine kinase-dependent mechanism independent of protein kinase C. This induces the release of phosphatidic acid or arachidonic acid for eicosanoid production in the vessel wall. A portion of this activity may be mediated by the Class A scavenger receptor ligands which stimulate macrophage urokinase expression and IL-1 production a growth factor for smooth muscle cells.

[0481] The biological properties of the lipids in mildly oxidized LDL differ from those induced by the lipids in highly oxidized LDL. For example, the expression of tissue factor by endothelial cells is induced by mildly oxidized LDL but not by highly oxidized LDL. The lipids in highly oxidized LDL are cytotoxic, whereas the lipids in mildly oxidized LDL are not. Mildly oxidized LDL induced the activation of the NFκB-like transcription factor and the increase in the appearance of specific oxidized phospholipids. With continued oxidation, highly oxidized LDL such as lysophosphatidylcholine and oxidized sterols are produced with different biological activity as given above.

[0482] The ability of mm-LDL to induce monocyte adherence to endothelial cells is mimicked by three polar bioactive lipids isolated from mm-LDL as well as oxidized 1-palmitoyl-2-arachidonyl-sn-glycerophosphocholine. The molecular structure of two bioactive lipids were identified

[0483] 1-palmitoyl-2-(5-oxovaleryl)-sn-glycero-3-phosphocholine (m/t 594.3) and 1-palmitoyl-2-glutaryl-sn-glycero-3-phosphocholine (m/t 610.2). The third lipid (m/t 831) has tentatively been described as an arachidonic acid-containing phospholipid containing three or four oxygen molecules, potentially forming a conjugated triene structure characteristic of leukotrienes. The latter serves as a substrate for paraoxonase, and those with fragmentation products such as 5-oxyvalerate at the sn-2 position may represent substrates for PAF acetylhydroxylase.

[0484] Glycated LDL

[0485] Glycated LDL is recognized less well by the LDL receptor, but is taken up more rapidly by macrophages. Very prolonged exposure of LDL to high concentrations of glucose leads to glucose-mediated cross-linking and the generation of advanced glycosylation end products, which macrophages recognize in a specific saturable fashion.

[0486] Artificial Complexes of LDL

[0487] Artificial complexes of LDL formed by incubation with fibronectin, heparin, and fibrillar collagen are also candidates, and the uptake there appears to be through recognition of the fibronectin. Complexes of LDL with itself are taken up more rapidly than native LDL via the LDL receptor. After incubation with neutrophils LDL is taken up more rapidly by macrophages. This is attributable to the dimerization of LDL by the action of secreted neutrophil elastase on native LDL

[0488] Apoprotein Genes

[0489] The genes for the major apoproteins associated with the lipoproteins have been cloned. These include apolipoprotein (a) (McLean J W Nature 330: 132-137 (1987)), apolipoprotein B-100 (Chen S H J. Biol Chem. 261: 12918-12921 (1986)), apolipoprotein E4 provided by Drs. S Lauer and J. Taylor. Lp(a) has been cloned from cDNA libraries constructed from human liver mRNA (McLean J W Nature 330: 132-137 (1987)). Complete sequence analysis of a 14 000-base-pair (bp) DNA copy of apo(a) mRNA showed many exact or nearly exact repeats of a 342-bp sequence occurred. Indeed, most of the mRNA consist of 22 tandem exact repeats and 15 modified repeats. Apolipoprotein (a) belongs to a gene family that includes genes encoding clotting factors, structural proteins, and growth factors. Domains shared by these proteins are protease-like domains, kringle units, calcium binding domains, and epidermal growth factor precursor domains.

[0490] In the present invention, superantigens are ligated to the major classes of lipoproteins in human plasma including LDL, IDL, HDL, VLDL, chylomicrons and remnants containing apoproteins and mm-LDL, oxy LDL isosterols, inositols, lysophosphatidylcholine, synthetic mimics of LDL activity and oxyLDL byproducts by methods given in Example 47 Because of their unique capacity to adhere to tumor microvasculature and evoke an apoptotic/inflammatory/prothrombotic response, the lipoprotein structures preferred for ligation to SAg include but are not limited to Lp(a), LpB-1000 or B-47, oxyLDL, oxyLDL byproducts, oxyLDL mimics and IDL.

[0491] The lipoproteins used for conjugation are prepared as in Examples 48-49. The superantigens used for conjugation are preferentially in nucleic acid or phage form but may also be in peptide, polypeptide nucleic acid or phage display form. They are coupled to the various LDL, oxyLDL or apolipoproteins via methods given in Examples 3, 5, 47. Alternatively, SAg are incorporated or bound or conjugated to a vesicular, exosomal structures shed from normal, tumor or sickled cells expressing LDL, oxy LDL, oxyLDL mimics or apolipoproteins.

[0492] Superantigens are also integrated into liposomal structures prepared to express natural or synthetic LDL, oxyLDL, apolipoproteins or oxyLDL mimics as described in Section 45 and Examples 3, 5, 6, 36, 42. Optionally, integrin ligand sequences such as RGD are added to facilitate the localization of the conjugates to the tumor microvasculature binding to the αᵥβ₃ integrin and αᵥβ₅ integrin which are expressed therein (see Example 6). These superantigen-lipoprotein conjugates are physically trapped in the dense network of randomly branching blood vessels of the tumor microcirculation and also bind to LDL or scavenger receptors expressed in the tumor neovasculature.

[0493] Constructs consisting of naked Sag nucleic acids containing CpG backbone fused to apoprotein nucleic acids alone or incorporated into liposomes are prepared as in Example 3, 6, 14, 30-31 and delivered to the tumor sites in vivo as in Examples 14, 30-31. These constructs are useful in vivo as a therapeutic antitumor vaccines according to Examples 14, 15, 16, 18-23. They are also useful ex vivo for producing a population of tumor specific effector cells (T cells, γ/δT cells, NK cells, NKT) cells for adoptive immunotherapy of cancer (Examples 2-5, 7, 15, 16, 18-23).

[0494] Tumor Cells or Sickled Erythrocytes and Vesicles Expressing SAg and Apolipoproteins

[0495] Superantigen nucleic acids are fused in frame to nucleic acids encoding apoproteins including but not limited to apoproteins Lp(a), B-48 and 100 and E3 and transfected into tumor cells in vivo to produce tumor cells expressing superantigens and apoproteins. These tumor cells are recognized by apoprotein receptors in tumor microvasculature. Tumor cells are also transfected ex vivo with the identical nucleic acid constructs. A RGD sequence is added to promote deposition in the tumor microvasculature which are useful. These tumor cell transfectants expressing Sag, apoprotein and RGD bind to apoprotein receptors and integrins respectively expressed in tumor microvasculature wherein they initiate a potent and localized anti-tumor response.

[0496] Superantigen nucleic acids together with nucleic acids encoding either apo(a), apoB and apoE4 are also transfected into nucleated sickled erythrocytes (e.g., proerythroblast or normoblast phase) by methods given in Examples 1 and 6. The integrin ligand RGD nucleic acids are transfected into tumor cells or sickled cells to facilitate the localization of the transfected tumor cells and sickled cells to integrins expressed in the tumor neovasculature in vivo (see Example 6). Alternatively, the sickled erythrocytes or tumor cells acquire the apolipoprotein or oxyLDL by coculture with liposomes which express the apolipoprotein or oxyLDL (see Section 7 & Example 5).

[0497] These tumor cells or sickle cell transfectants are administered parenterally and are capable of trafficking to tumor microvasculature wherein they bind to apolipoprotein and scavenger receptors on endothelial cells and macrophages. The transfectants are phagocytosed by macrophages cells and induce endothelial cell apoptosis. SAgs expressed on the tumor cells and sickle cells also induce a local T cell inflammatory anti-tumor response which envelops the neighboring tumor cells.

[0498] These tumor cell and sickle cell constructs are prepared by methods given in Examples 1 & 6 and are useful in vivo against primary and/or metastatic tumors according to Examples 14, 15, 16, 18-23.

[0499] Tumor Cells & Endothelial Transfected in Vivo with SAg and Lipoprotein Receptors or Oxidized Lipoprotein Receptors

[0500] The genes encoding the LDL oxyLDL, VLDL, LRP, CD36, SREC and LOX-1 receptors as well as macrophage scavenger receptors, expressed on endothelial cells and macrophages and have been cloned. Nucleic acids encoding receptors for various apolipoproteins including but not limited to the LDL or apo a, apoB or apo E receptor, CD36 receptor, LRP receptor, macrophage scavenger receptor, endothelial cell oxyLDL receptor (LOX-1) and endothelial cell scavenger cell receptor (SREC) alone or together with nucleic acids encoding superantigens are injected directly into tumor sites. The same nucleic acids are transfected into tumor cells in vivo. Transfection of these receptors into tumor cells and tumor microvascular endothelial cells results in the expression of the LDL receptor protein with high affinity binding specificity for LDL oxyLDL and Lp(a). Exposure of the transfected tumor cells or endothelial cells to exogenously introduced oxidized LDL (especially sterol and lysocholinephosphatidic acid) induces tumor endothelial cell apoptosis analogous to that seen in endothelial cell after exposure to oxyLDL. The transfected tumor cells internalize and degrade the oxyLDL and because they, like macrophages, have no means of down regulating the scavenger receptor are transformed to “foam cells” and undergo apoptosis.

[0501] LDL Receptor (LDL-R)

[0502] The high affinity receptor for LDL known as the apoB receptor or the LDL receptor (LDL-R) found on tumor microvascular cells as well as hepatic cells and macrophages binds LDL, VLDL and chylomicron remnants via their associated apoproteins. Apolipoprotein B-100 gene has been cloned (Chen S H J. Biol Chem. 261: 12918-12921 (1986)). The LDL gene is more than 45 kilobases in length and contains 18 exons. Thirteen of the 18 exons encode protein sequences that are homologous to sequences in other proteins: five of these exons encode a sequence similar to one in the C9 component of complement; three exons encode a sequence similar to a repeat sequence in the precursor for epidermal growth factor (EGF) and in three proteins of the blood clotting system (factor IX, factor X, and protein C); and five other exons encode nonrepeated sequences that are shared only with the EGF precursor. Tb LDL receptor appears to be a mosaic protein built up of exons shared with different proteins, and it therefore belongs to several supergene families (Sudhof T C et al., Science 228: 815-22 (1985)).

[0503] Regulation of LDL-R expression occurs primarily at the transcriptional level and is controlled by levels of free cholesterol in the cell. Inflammatory mediators such as growth factors and cytokines can promote the binding and uptake of LDL. These mediators include PDGF, TGF-b, basic fibroblast growth factor, TNFa, and IL-1. Some of these mediators, such as TNF-a and IL-1, affect transcriptional regulation of the LDL-R gene at the level of the promoter.

[0504] VLDL Receptor

[0505] The VLDL receptor has been described as a new member of the LDL receptor supergene family that specifically binds VLDL and chylomicron remnants via apolipoprotein E and lipoprotein lipase. Both apolipoprotein E and lipoprotein lipase are constituents of chylomicron remnants, and a physiological ligand for the VLDL receptor (Niemeier A et al., J. Lipid Res. 37: 1733-42 (1996)).

[0506] LRP Receptor

[0507] The alpha 2-macroglobulin receptor or lipoprotein receptor-related protein (LRP) (LRP) is a cell-surface glycoprotein of 4525 amino acids that functions as a multifunctional receptor which binds and rapidly internalizes several plasma proteins. These include alpha 2-macroglobulin-protease complexes, free plasminogen activators as well as plasminogen activators complexed with their inhibitors, and beta-migrating very low density lipoproteins complexed with either apolipoprotein E or lipoprotein lipase tissue and urokinase-type plasminogen activators, plasminogen activator inhibitor-1, lipoprotein lipase, and lactoferrin. The active receptor protein is derived from a 600-kDa precursor, encoded by a 15-kb mRNA, cloned and sequenced in human, mouse, and chicken. The entire human gene (LRP1) coding for A2MR/LRP has been cloned. The gene covers about 92 kb and a total of 89 exons, varying in size from 65 bases (exon 86) to 925 bases (exon 89) have been identified. The introns vary from 82 bases (intron 53) to about 8 kb (intron 6). In the introns, 3 complete and 4 partial Alu sequences have been identified. Interexon PCR from exon 43 to 45 yielded a fragment of 2.5 kb. Attempts to subclone this fragment yielded inserts ranging between 0.8 and 1.6 kb. Sequencing of 3 subclones with different-size inserts revealed a complex repetitive element with a different size in each subclone. In the mouse LRP gene this intron is much smaller, and no repetitive sequence was observed. In 18 unrelated individuals no difference in size was observed when analyzed by interexon PCR (Van Leuven, F et al., Genomics 24: 78-89 (1994))

[0508] The LRP receptor is mainly responsible for the binding and internalization of chylomicron remnants as well as apoE-containing HDL. ApoE-containing lipoproteins are taken up and degraded by receptor-mediated endocytosis. Apolipoprotein E3- and apoE4-containing lipoproteins have a similar binding affinity and cause a similar degree of lipoprotein internalization via the LDL-R and the LRP. LRP can mediate the degradation of tissue factor pathway inhibitor (TFPI), a Kunitz-type plasma serine protease inhibitor that regulates tissue factor-induced blood coagulation,

[0509] The 3 9-kDa receptor-associated protein (RAP) associates with the multifunctional low density lipoprotein (LDL) receptor-related protein (LRP) and thereby prevents the binding of all known ligands, including alpha 2-macroglobulin and chylomicron remnants. RAP is predominantly localized in the endoplasmic reticulum and functions as a chaperone or escort protein in the biosynthesis or intracellular transport of LRP. RAP promotes the expression of functional LRP in vivo and stabilizes LRP within the secretory pathway.

[0510] Macrophage Scavenger Receptors

[0511] Scavenger receptors mediate the endocytosis of chemically modified lipoproteins, such as acetylated low density lipoprotein (Ac-LDL) and oxyLDL. Functional MSR are trimers of two C-terminally different subunits that contain six functional domains. The MSR gene has been cloned in an 80-kilobase human and localized to band p22 on chromosome 8 by fluorescent in situ hybridization and by genetic linkage using three common restriction fragment length polymorphisms. The human MSR gene consists of 11 exons, and two types of mRNAs are generated by alternative splicing from exon 8 to either exon 9, (type II) or to exons 10 and 11 (type I). The promoter has a 23-base pair inverted repeat with homology to the T cell element. Exon 1 encodes the S-untranslated region followed by a 1 2-kilobase intron which separates the transcription initiation and the translation initiation sites. Exon 2 encodes a cytoplasmic domain, exon 3, a transmembrane domain, exons 4 and 5, an alpha-helical coiled-coil, and exons 6-8, a collagen-like domain. The position, of the gap in the coiled coil structure corresponds to the junction of exons 4 and 5. The human MSR gene consists of a Macrophage scavenger receptors (MSR) mediate the binding, internalization, and processing of a wide range of negatively charged macromolecules. Functional MSR are trimers of two C-terminally different subunits that contain six functional domains. The MSR gene has been cloned in an 80-kilobase human and localized to band p22 on chromosome 8 by fluorescent in situ hybridization and by genetic linkage using three common restriction fragment length polymorphisms. The human MSR gene consists of 11 exons, and two types of mRNAs are generated by alternative splicing from exon 8 to either exon 9 (type II) or to exons 10 and 11 (type I). The promoter has a 23-base pair inverted repeat with homology to the T cell element. Exon 1 encodes the S-untranslated region followed by a 1 2-kilobase intron which separates the transcription initiation and the translation initiation sites. Exon 2 encodes a cytoplasmic domain, exon 3, a transmembrane domain, exons 4 and 5, an alpha-helical coiled-coil, and exons 6-8, a collagen-like domain. The position of the gap in the coiled coil structure corresponds to the junction of exons 4 and 5. The human MSR gene consists of a mosaic of exons that encodes the functional domains. Furthermore, the specific arrangement of exons played a role in determining the structural characteristics of functional domains (Emi M et al., J. Biol. Chem. 268: 2120-5 (1993)).

[0512] Scavenger receptors on tumor endothelium and stroma bind oxidized LDL, apoptotic cells, and anionic phospholipids. Class A receptors, includes the type I and II macrophage scavenger receptors (SR-M and SR-MI). They are found predominantly on macrophages and activated smooth muscle cells. SR-M and SR-MI are homotrimeric membrane proteins, which are derived from alternatively spliced mRNA products of a single gene. Ligands for class A receptors include acetylated LDL, oxidized LDL, fucoidan, and carrageenan. The second class, Class B scavenger receptors, includes CD36 and SR-El, which are found in adipose tissue, lung, liver, and macrophages.

[0513] Acetyl LDL Receptor

[0514] Acetyl LDL receptor or the scavenger receptor, is distinct from the LDL receptor and does not recognize native LDL. It has been found on tumor microvascular cells as well as monocyte/macrophages, Kupfer's cells, and endothelial cells, particularly the sinusoidal endothelial cells in the liver. The same receptor also recognizes other chemically modified forms of LDL, including acetoacetyl LDL and malondialdehyde-conjugated LDL. The acetyl LDL receptor binds OxLDL LDL modified by incubation with cultured endothelial cells. LDL incubated with cultured endothelial cells for 12 to 18 hours, undergoes a physical and chemical changes and the resulting endothelial cell-modified form of LDL is taken up by cultured macrophages 10 times more rapidly than native LDL. Thus, all three the major cell types in the artery wall can convert LDL to a form recognized by the acetyl LDL receptor.

[0515] CD36 Receptor

[0516] CD36, a multigland glycoprotein structurally related to SR-BI and CLA-1 found on monocytes, endothelial cells is a high affinity receptor for the native lipoproteins HDL, LDL, VLDL and for OxLDL and AcLDL. The CD36 gene has been cloned (Endemann G et al, J. Biol. Chem. 268:11811-6 (1993)).

[0517] Endothelial Receptors for OxyLDL: The LOX-1 Receptor (C-Type Lectin Receptor) & Scavenger Receptor Expressed by Endothelial Cells (SREC)

[0518] Endothelial dysfunction or activation elicited by oxidatively modified low-density lipoprotein (Ox-LDL) is characterized by intimal thickening and lipid deposition in the arteries. Ox-LDL and its lipid constituents impair endothelial production of nitric oxide, and induce the endothelial expression of leukocyte adhesion molecules and smooth-muscle growth factors. Vascular endothelial cells in culture and in vivo internalize and degrade Ox-LDL through a putative receptor-mediated pathway that does not involve macrophage scavenger receptors.

[0519] LOX-1 Receptor

[0520] LOX-1, a novel receptor for oxy-LDL, is a membrane protein that belongs structurally to the C-type lectin family, and is expressed in vivo in vascular endothelium and vascular-rich organs. The LOX-1 receptor from vascular endothelial cells has been cloned (Hoshikawa H et al., Biochem. Biophys. Res. Commun. 245: 841-6 (1998)). Mouse LOX-1 is composed of 363 amino acids with a C-type lectin domain type II membrane protein structure and triple repeats of the sequence in the extracellular “Neck domain,” which is unlike human and bovine LOX-1. LOX-1 binds oxidized LDL with two classes of binding affinity in the presence of serum. The binding component with the higher affinity showed the lowest value of Kd among the known receptors for oxidized LDL. With respect to ligand specificity, LOX-1 is a receptor for oxy-LDL but not for Ac-LDL and recognizes a protein moiety of oxy-LDL with a ligand specificity that is distinct from other receptors for oxy-LDL, including class A and B scavenger receptors.

[0521] Scavenger Receptor Expressed by Endothelial Cells (SREC)

[0522] The primary structure of the SREC molecule has no significant homology to other types of scavenger receptors, including the LOX-1 receptor. The cDNA encodes a protein of 830 amino acids with a calculated molecular mass of 85, 735 Da (mature peptide). The cloned has an N-terminal extracellular domain with five epidermal growth factor-like cysteine pattern signatures and long C-terminal cytoplasmic domain (391 amino acids) composed of a Ser/Pro-rich region followed by a Gly-rich region (Adachi H et al, J. Biol. Chem. 272:31217-20 (1997)

[0523] The SREC mediates the binding and degradation of acetoacetylated (AcAc) and acetylated (Ac) low density lipoproteins (LDL). Isolated sinusoidal endothelial cells from the rat liver show saturable, high affinity binding of AcAc LDL and degrade AcAc LDL 10 times more effectively than aortic endothelial cells. Specific sinusoidal endothelial cells bearing the SREC not the macrophages of the reticuloendothelial system, are primarily responsible for the removal of these modified lipoproteins from the circulation in vivo. For this reason, the SREC receptor and the LOX-1 receptors are preferred for use in transfecting tumor cells tumor endothelium in vivo.

[0524] Polypeptide or naked DNA encoding receptors for LDL oxyLDL, VLDL, LRP, CD36, SREC, LOX-1 and macrophage scavenger receptor (collectively o-LDL receptors) are used individually or together with SAg polypeptide or naked DNA containing the CpG backbone are prepared as in Examples 1, 2, 3, 30-31. Alternatively, SAg are incorporated or bound or conjugated to vesicular or exosomal structures shed from cells expressing the LDL, oxy LDL receptors. Superantigens are also incorporated into liposomal structures which express natural or synthetic LDL, oxyLDL receptors as described in Section 45 and Examples 3, 5, 6, 36, 42. All of these constructs are administered in vivo by any route but preferably by intratumoral injection as in Examples 2, 6, 14, 30-31. Once localized, and expressing o-LDL receptor(s) in tumor sites in vivo, lipoprotein preparation(s) containing their respective ligands are administered to the host. These LDL, oxyLDL or lipoproteins are non toxic to the host generally but upon binding to a dense population of receptors in the tumor induce apoptosis of tumor cells and endothelial cells expressing the receptors and initiate a well localized anti-tumor response. The presence of the SAg at the same site amplifies the immune and inflammatory anti-tumor effect. The advantage of this system is the minimal toxicity to the host since the o-LDL receptors are of host origin and the lipid infusions consist of substances which are indigenous to the host. These constructs are useful in vivo against primary or metastatic tumors according to Examples 14, 15, 16, 18-23.

### 50. SAg Inserted into Oncolytic Viral Vectors: SAg-Viral Antigen Nucleotides & Fusion Proteins and Conjugates

[0525] SAgs and HPV-E6 or 7 polypeptides are chemically conjugated by methods given in Examples 3. Alternatively, the naked nucleotides comprising SAgs (with immunostimulatory sequences) and the HPV-E6 or E7 are prepared as chimeric nucleotides or proteins by methods given in Examples 5, 30, 31 60. The SAg nucleic acids are inserted into several sites in lytic and oncogenic viruses. For example, in HPV, the SAg nucleotide is substituted for a minimally functional domain such as viral capsid nucleotides whereas in adenoviruses, SAg is substituted for the E1 or E3 nucleotides as in Example 60 These constructs are transfected into tumor cells in vivo. Since HPV is not a good vector the SAg-HPV E6 or E7 chimeric plasmid is introduced preferentially into vaccinia virus for purposes of transfection. In tumor cells, the HPV E6 protein triggers the inactivation of P53 via the ubiquitin pathway favoring the proliferation of virus and eventual tumor cell oncolysis. With viral oncolysis, the SAg nucleic acids and transcribed polypeptide are shed and the virus (and SAg nucleotides) then infect new tumor cells while the shed SAg polypeptide induces a T cell tumor inflammatory response. Preparation of the SAg-viral constructs is given in Example 60. Chimeric plasmids are prepared consisting the SAg fused to viral epitope known to be immunogenic. An example of this construct is SAg-E6 or E7 construct as given in Example 60. The SAg-HPV E6 or E7 chimeric gene is transfected into tumor cells as given in Examples 1 and 60. The SAg-HPV-E6 or E7 chimeric gene, tumor cells transfected with and expressing SAg and HPV-E6 or E7 epitopes, polypeptide conjugates or fusion proteins comprising SAgs and HPV-E6 or E7 or are used as preventative or therapeutic vaccines under protocols given in Examples 14, 15, 16, 18-23, 30, 31, 60.

[0526] DNA Vaccine Comprising a SEB Gene Linked to a to Papilloma Virus Antigen Gene (SEB-E7 and SEB-E1) Confer Protection Against Tumor Challenge in Mouse and Rabbit Tumor Models.

[0527] We evaluated protective and immunotherapeutic potential of modified DNA vaccines by administration of fusion genes comprised of Staphylococcal enterotoxin B (SEB) and HPV-16 E7 or CRPV E6, E7, E8 (SEB-E6,E7,E8) in mouse and rabbit models.

[0528] Methods: Methods for preparation of the fusion proteins and their administration are given in Example 71.

[0529] We used particle bombardment with a gene gun to vaccinate C57BL/6 mice and inbred EIII/JC rabbits intradermally. Mice received IIPV16-E7, vector, SEB-E7 and E7-SEB fusion genes; rabbits received CRPV E1, E6, E7, E8 genes, SEB gene, and CRPV E1, E6, E7, E8 fused to SEB. Then animals were challenged with HPV16 E6 and E7-containing TC-1 cells (mice) or CRPV (rabbits). In a therapeutic study, we used vector, CRPV-E7gene, SEB-E7 and E7-SEB fusion genes repeatedly at various time points to vaccinate outbred New Zealand white rabbits beginning 80 days after infection with CRPV at which time, papillomas were large and established.

[0530] Mouse Model: Protection with SEB-HPV16E7 Immunization

[0531] We used particle bombardment with a gene gun to vaccinate C57BL/6 mice intradermally. Mice received HPV16-E7, vector, SEB-E7 and E7-SEB fusion genes. Mice were challenged with HPV16 E6 and E7-containing TC-1 cells (mice) Mice receiving the SEB-E7 fusion gene showed complete protection against challenge with TC-1 tumour cells, and remained tumour free for 40 days. In contrast, groups of mice receiving E7-SEB, E7 only, SEB and vector all developed tumours that grew rapidly and reached 14 mm in diameter after 4 weeks. See FIG. 3.

[0532] Rabbit Model: Protection with SEB-HPV16E1 and SEB-E7 Immunization

[0533] Particle bombardment with a gene gun was used to vaccinate inbred EIII/JC rabbits intradermally. Rabbits received CRPV E1, E6, E7, E8 genes, SEB gene, and CRPV E1, E6, E7, E8 fused to SEB. Rabbits were challenged with CRPV.

[0534] The SEB-E1 fusion gene was the most effective in inhibiting the growth of the outgrowth of CRPV-induced papillomas. See FIG. 4.

[0535] In a second experiment, 3 of 4 vector- and 3 of 4 CRPVE7-SEB-vaccinated rabbits developed malignancies 420 days after CRPV infection. At this same time point, 5/5 rabbits receiving CRPVE7 and 5/5 rabbits receiving SEB-CRPVE7 were cancer free (Table 1). The mean time to onset of squamous carcinoma of CRPV-induced skin papillomas showed was delayed for groups of rabbits receiving SEB-E7 and E7 only, compared to E7-SEB and vector group (P<0.5). One of 5 rabbits receiving SEB-CRPVE7 showed therapeutic clearance of the primary papillomas (See table below).

| | Rabbits with cancer/rabbits vaccinated with | | | |
|---|---|---|---|---|
| Day after | the following constructs | | | |
| CRPV | pCX- | pCX- | PCX-SEB- | PCX-CRPV- |
| infection | EGFP | CRPV-E7 | CRPV-E7 | E7-SEB |
| 338 | 2/4 | 0/5 | 0/5 | 0/4 |
| 359 | 2/4 | 0/5 | 0/5 | 1/4 |
| 389 | 2/4 | 0/5 | 0/5 | 2/4 |
| 423 | 3/4 | 0/5 | 0/5 | 3/4 |
| 440 | 3/4 | 0/5 | 1/5 | 3/4 |

[0536] Gene gun-mediated DNA vaccination by administration of fused genes induced strong antitumor immunity in animal models which may have implications in the future design of antigen-specific cancer immunotherapy. Homologues of the papilloma antigens are also contemplated in this invention as fusion partners for the SAg. Likewise, the superantigen homologues may serve as fusion partners for the papilloma antigens or homologues. Homologues that are encompassed by this invention are given in Example.

[0537] An SE or an SE such as SEB (with Dominant Epitope Deleted) Conjugated to Papilloma Virus E7 or E1 or Other Tumor Specific Antigens such as the MUC1 Antigen and Costimulants OX-40 Ligand or 4-1BB1.

[0538] HPV-16 E7 is a model antigen because HPVs, particularly HPV-16, are associated with most cervical cancers. The HPV 16 E7 protein has been identified as a zinc binding phosphoprotein with two Cys-X—X-Cys domains composed of 98 amino acids. HPV-16 E7 is characterized as a cytoplasmic/nuclear protein and is more abundant than E6 in HPV-associated cancer cells. Early observations analyzing HPV genomes and the viral transcription pattern in cervical carcinoma cell lines revealed frequent integration of viral DNA and the consistent expression of the viral early E7 gene. The same gene is necessary for immortalization of various types of human cells. The HPV oncogenic protein E7 is important in the induction and maintenance of cellular transformation and is coexpressed in most HPV-containing cervical cancers. E7 gene expression is also necessary for the proliferative phenotype of cultured cervical carcinoma cells. Therefore, vaccines or immunotherapies targeting E7 and/or E6 proteins may provide an opportunity to prevent and treat HPV-associated cervical malignancies. While E1, E6, E7 are exemplified in this disclosure, other antigens associated with the papilloma virus induced tumors will serve equally as well and are contemplated as part of this invention.

[0539] SAgs and HPV-E7 or E1 polypeptide or are recombinantly fused together with nucleic acids encoding the OX-40 ligand All of the components of the construct are in DNA or polypeptide form. This construct is tested in murine and rabbit models of HPV infection as a vaccine or against established tumors as in the above rabbit and mouse papilloma models. Immunization schedules are given in Example 71. The constructs are also used to treat established papillomas using the same rabbit and mouse models but administering the constructs when the tumors are established 30-90 days after tumor implantation. The treatments are given parenterally by injection or infusion twice or three times weekly for 4-6 weeks Nucleic acid constructs are injected preferably intratumorally twice to three times weekly for four weeks.

[0540] Dendritic Cell Ingestion of Necrotic HPV Infected Tumor Cells

[0541] Dendritic cell are exposed to SAg and HPV-E6 or E7 transfected tumor cells which have undergone necrosis by methods including but not limited to several cycles of freezing and thawing (Sauter B et al., J. Exp. Med. 191: 423-433 (2000)). The dendritic cells ingest the necrotic tumor cell transfectants. In the dendritic cells, the viral antigens undergo cross priming to the class I pathway. These primed dendritic cells are then harvested and administered to the tumor bearing host as given in Examples 26-28, 60. They are also used to sensitize T cells ex vivo.

[0542] In another embodiment, the DNA and RNA from these SAg-HPV-E6 or E7 transfected tumor cells or dendritic cells are extracted and utilized for in vivo therapy as in Examples 30-34, 60. While the HPV-E7 exemplified herein is a viral immunogen, the method is applicable to any other immunogenic viral constituent associated or etiopathogenic in the malignant process. Non-viral tumor associated antigens given in Rosenberg S A Cancer: Principles and Applications of Biologic Therapy in Principles & Practice of Oncology sixth edition edited by V T DeVita, S Hellman, S A Rosenberg, J. B Lippincott Co., Philadelphia 1999); Ostrand-Rosenberg, S. In: Gene Therapy of Cancer, E. C. Lattime et al., eds, pp. 33-44 Academic Press San Diego, Calif. 1999; Schreiber, H., In: Fundamental Immunology, W E Paul, ed., Raven Press, New York, 1993, are also useful. The viruses include but are not limited to adenovirus, EB virus, herpesvirus, hepatitis B, cytomegalovirus and Kaposi's sarcoma. DNA vectors encoding SAg and other viral or non viral tumor associated antigens are also functionally enhanced in producing an antitumor effect by the inclusion of immunostimulatory sequences, optimal promoters, introns, and polyadenylation signals. (Donnelly J J et al., Annu. Rev. immunol. 15: 617-648 (1997).

[0543] Selectivity of SAg-Viral Nucleotides for Tumor Cells

[0544] Maximum selectivity of the viral-SAg construct for tumor tissue in vivo is achieved by increasing the expression of genes necessary for replication in tumor cells or by decreasing expression of such genes in normal cells. Approaches to express genes necessary for replication only in specific tissues are used. Tumor-specific viral-SAg gene expression is accomplished through the use of tissue-specific promoters. Such promoters are activated preferentially in the tissue of tumor origin. Tumors arising from nonvital organs are amenable to this approach (e.g. prostate cancer or melanoma). Tissue-specific gene expression is achieved using adenovirus and retroviral vectors. The adenoviral E1B promoter is replaced with albumin or immunoglobulin promoters, resulting in liver- or myeloma-specific E1B mRNA transcription, respectively. The E1A enhancer markedly increases transcription from the albumin promoter, particularly in the presence of the E1A protein. The prostate-specific promoter and the alphafetoprotein promoter are exchanged with the E1A promoter to achieve enhanced replication in cells from the prostate (cancer and normal cells) and in hepatocellular carcinomas, respectively. In one embodiment, the SAg nucleotide is introduced into the above adenoviral constructs preferably at non functional sites as given in Example 60. The viral construct exhibits specificity for tumor cells and induces oncolysis. SAg expressed on the tumor cells induces a T cell inflammatory response. SAg polypeptide is also produced by the SAg-viral transfected bystander tumor cells that are infected with the SAg-viral construct and induces a potent inflammatory T cell tumoricidal response.

[0545] The preferred virus for insertion of the SAg nucleotide is an attenuated adenovirus d11520 that lacks the 827-base pair which encodes a 55-kilodalton E1B-55-kDa protein that inactivates P53. The binding of E1B to p53 is necessary for efficient replication in normal cells. However, E1B-55-kDa is dispensable in tumor cells lacking functional P53. Indeed, P53 function is lost in over 50 percent of all human cancers. Similarly, the deletion of specific RB-binding sites in the E1A protein leads to selective replication in cancer cells with abnormalities in the RB pathway and in proliferating normal cells. Such attenuation of viruses potentially decrease replication in tumor cells. Replication competence is better maintained by selectively mutating the gene rather than deleting it completely. For example, second generation adenovirus E1B-55-kDa gene mutants still lack p53-binding but retain the viral mRNA transport function (which is lost with the total E1B-55-kDa gene deletion); these viruses replicate more efficiently in p53-deficient cells than do mutants completely lacking the 55-kDa gene. SAg nucleotide is inserted into the dl1520 as given in Example 60. SAg protein is produced by the transfected tumor cell or by bystander tumor cells that are infected by the dl1150-SAg after viral-induced oncolysis. The SAg induces a potent T cell tumoricidal inflammatory response.

[0546] An additional approach to abrogating replication in normal cells, but not in tumor cells, is to delete/mutate genes necessary for replication in normal cells that are dispensable in tumor cells. For example, HSV-1 ribonucleotide reductase and thymidine kinase are essential for viral DNA synthesis in quiescent cells, whereas in rapidly proliferating cells these enzymes are not necessary. In a clinical situation such as primary brain cancer the tumor cells are susceptible to replication and lysis by such deletion mutants. In contrast, the surrounding neurons are quiescent and resistant to viral replication. This approach results in a proliferating-cell-specific, and not a cancer-specific, therapeutic agent. Nucleic acids encoding SAg are inserted into the HSV deletion mutants. SAg protein is produced by the transfected tumor cell or by bystander tumor cells that are infected by the SAg-HSV deletion mutants after viral-induced oncolysis. The SAg induces a potent T cell tumoricidal inflammatory response.

[0547] A class of negative selectable markers includes genes whose enzyme protein products convert a prodrug into its toxic form. This class is termed suicide genes. Genetic modification of tumor cells with the herpes simplex virus thymidine kinase gene (HSV-TK) results in killing of the gene-modified tumor cells by the antiviral drug ganciclovir (QCV). GCV is a derivative of acyclovir, which are nucleoside analogs that can be phosphorylated by the viral thymidine kinase gene into a monophosphate form. Normal cellular enzymes can then di- and triphosphorylate the monophosphate form into a toxic drug, which functions as a DNA chain terminator and an inhibitor of the viral DNA polymerase. The HSV-TK enzyme is almost 1,000-fold more efficient at monophosphorylating GCV than is the cellular thymidine kinase. Thus, GCV is virtually nontoxic to uninfected cells at therapeutic concentrations of the drug (1-10 μM). Because the toxic metabolite of GCV is phosphorylated, its ability to cross cell membranes is impaired and thus its half-life within the cell is six times longer (18-24 hours) than that of unmodified GCV. The increased cellular half life of the phosphorylated CCV is an important feature of the anticancer effects of HSV-TK-gene-modified tumors.

[0548] An important feature of the tumoricidal response induced by suicide genes is that as few as 10% of the cells in a tumor containing the HSV-TK-gene-modified cells are sufficient to kill the entire tumor population. In addition long-term gene expression is not required because tumor cells expressing the HSV-TK suicide gene are killed after only a short exposure to GCV undergoing apoptotic or programmed cell death initiated by the triphosphorylated toxic drug metabolite.

[0549] In this embodiment, the SAg nucleic acids are cotransfected into tumor cell together or fused to the HSV-TK gene with the HSV-TK gene after which GCV is introduced. The SAg gene is unaffected by GCV. Expression of SAg nucleotides and polypeptides released from tumor cells undergoing viral oncolysis enhances the primary tumor killing and the bystander effect of the suicide genes. by inducing a T cell inflammatory tumoricidal response.

[0550] Other viruses with specificity for tumor cells, proliferating cells, ras or ras pathway activation or p53 mutations in which SAg nucleic acids are inserted include autonomous parvoviruses, reoviruses and Herpes simplex virus-1. Adenovirus (serotype 5) which is selective for malignant prostate cells due to E1A expression driven by a PSE element and adenovirus (⅖ chimera) which is avid for cells lacking p53 function due to a E1B-55 kD gene deletion and insertion of HSV-tk/CD fusion are also be used as vectors for superantigen nucleic acids and targeting superantigens selectively to tumor sites.

[0551] Replication-selective adenoviruses mediate anti-tumor effects in variety of ways and are ideal vectors and devices for targeting superantigen nucleic acids to tumor in vivo. Adenoviruses exert direct tumor cytotoxicity modulated by E3 11.6 kD and EORF4. They augment anti-tumor immunity via CTL infiltration and direct killing (modulated by E3gp19 kD), antigen release (modulated by E3 11,6 kD), augment immunostimulatory cytokine induction and increase anti-tumor cytokines (e.g., TNF, modulated by E3 10.4/14.5, 14.7 kD), enhance sensitivity to cytokines (e.g., TNF, modulated by E1A), and increase sensitization to chemotherapy. Superantigen nucleic acids are integrated into the genome of any of the adenoviruses with the above properties and administered parenterally, intratumorally or intrathecally to tumor bearing hosts. The superantigen nucleic acids are targeted to tumor sites where they transfect tumor cells or non-tumor cells in the vicinity of the tumor resulting in the expression of superantigen polypeptide. In this way a T cell inflammatory tumoricidal effect is therefore induced localized selectively to the tumor sites.

[0552] In another embodiment, SAg nucleic acids are also inserted into a viral vector which contains a site of expression or overexpression of a host tumor associated antigen. Nucleotides encoding tumor associated antigens (TAAs) such as immunodominant Mart-1, tyrosinase or Mage are preferred although any TAA nucleotide are used. These viral vector with sequences encoding SAg and tumor associated antigen retain their specificity for tumor cells by incorporating a tissue or tumor specific promoter or driver encoding a key protein or transcription factor such as prostate specific antigen, human kallikrein promoter or alphafetoprotein or host tumor suppressor binding protein. The examples of nucleic acids encoding SAg expressed a HPV E6 or E7 or prostate specific antigen plasmid are given above.

[0553] These SAg-viral constructs given above are transfected into tumor cells in vivo. They are given directly into tumor tissue or injected parenterally (intramuscularly, subcutaneously, intrathecally, intraperitoneally or intravenously) where because of their selectivity for tumor or proliferating tissue will localize in tumors. In another embodiment, SAg-viral naked DNA constructs are administered as a vaccine parenterally (intramuscularly, subcutaneously, intrathecally, intraperitoneally or intravenously) or directly into tumor cells in vivo. Peptide or polypeptide conjugates, fusion proteins comprising SAg linked to viral epitopes and/or tumor antigens are also useful, e.g., HPV-E6 and E7. These constructs are used as a preventative vaccines or against established tumors under protocols given in Examples 60.

[0554] Plasmid DNA and RNA Vectors for Production of Superantigens

[0555] To increase the potency of candidate nucleic acid vaccines, a self-replicating nucleic acid vaccine is created. The alphaviruses, accomplish self-replication through the action of a polyprotein called RNA replicase, that is encoded within a single open reading frame. Members of the Alphavirus genus include Sindbis virus, Semliki Forest Virus (SFV) and Venezuelan equine encephalitis (VEE). Alphaviruses contain a single strand of RNA that are directly translated by ribosomes (because of its positive polarity) producing the replicase polyprotein. This polyprotein is cleaved into four subunits that can then drive not only its own replication, but the replication of a structural protein that comprises the viral coat. Theoretically up to 200,000 copies of the RNAs and 100,000,000 molecules of heterologous proteins are made in a single cell.

[0556] The activity of a replicase-containing RNA vaccine is exemplified in various engineered DNA plasmids which are transcribed and capped in vitro. A single injection of as little as 0.1 μg the self-replicating RNA encoding a model tumor antigen, β3-galactosidase (p-gal), is sufficient to elicit antigen-specific antibody and cytotoxic T lymphocyte responses. As little as 1 μg of the self-replicating RNA consistently achieves complete protection from challenge with the β-gal-expressing CT26.CL25 tumor cell line. The replicase-based RNA vaccine is therapeutically effective in mice bearing tumors injected intravenously two days before the initiation of treatment. Tumor-bearing mice immunized with self-replicating RNA had significantly lower numbers of metastases and survived on the average 10-20 days longer than mice treated with non-replicating RNA. In addition, a several log enhancement of immunogenicity of the self-replicating vector was not merely due to enhanced production of antigen by the self-replicating RNA immunogens but rather to the induction of apoptosis by double-stranded RNA intermediates. The self-replicating RNA enhances the presentation of antigen by dendritic cells which occurs because of increased antigen uptake of cells that die apoptotically as a result of the activity of the self-replicating vector. Furthermore, double-stranded RNA intermediates formed during RNA replication induce maturation and activation of dendritic cells, either directly, or through the elaboration of local “danger signals”. DNA plasmids using a CMV promoter which can also generate a long positive strand of RNA (replicon) encoding a SAg which like the alphaviral genome itself is then capable of self replication are also useful. Similarly, any RNA or DNA vectors carrying nucleic acids encoding SAg which are enhanced by optimizing promoters, introns, and polyadenylation signals are useful (Donnelly, J J et al. Annu. Rev. Immunol. 15: 617-648 (1997); Leitner W W et al., Cancer Res. 60: 51-55 (2000)). In this embodiment, SAg is substituted for the LacZ to produce the pRep-SEB as given in Example 60. The pRep-SEB is used as a preventative vaccine and against established tumor as given in Example 60. There are used as preventative vaccines or against established tumor as given in Examples 60

[0557] Tumor Cells Transfected with SAg & SAg-Viral Constructs Induce Tumor Necrosis and Enhance Tumor Antigen Presentation by Dendritic Cells.

[0558] SAgs are capable of inducing an necrotizing tumoricidal response associated with generation of cytotoxic T cells and inflammatory cytokines (Dow S W et al., J. Clin. Invest. 101: 2406-2424 (1998 ). Tumor cells transfected with SAg-viral constructs undergo oncolysis. The SAg expressed in the construct induces a necrotizing tumoricidal response. Dendritic cells process the necrotic tumor cells to induce a T cell tumoricidal effect. Macrophages phagocytosing the SAg-viral transfected tumor cells are activated to become tumoricidal. When SAg-viral transfected tumor cells are exposed to exogenous apoptotic stimulus such as chemotherapy or radiation, the apoptotic tumor cells release SAg nucleotides and polypeptides together with intact virus The released virus spreads to infect neighboring tumor cells while the SAg polypeptide released from the lysed tumor cells produces a T cell inflammatory tumoricidal response accompanied by activation of tumoricidal macrophages.

[0559] Tumor cells transfected with the SAg-viral constructs express both viral and SAg epitopes. In the case of HPV, E6 or E7 epitopes are tumor specific antigens. Exposure to SAg together with viral antigen increases the immunogenicity of viral antigens by activating viral specific cytolytic CD8+ cells (Coppola M A et al., Int. Immunol. 9: 1393-1403 (1997). Hence, viral (tumor specific) epitopes coexpressed on tumor cells and presented with superantigen polypeptide produces an enhanced anti-viral response directed to viral epitopes expressed on the transfected tumor cells.

[0560] Dendritic cells ingesting apoptotic or necrotic tumor cells containing SAg-viral nucleotides, transcribe, express and present SAg and to T cells which are activated produce a tumoricidal response. T cells are also exposed in vitro to dendritic cells expressing SAg and viral epitopes from ingested apoptotic or necrotic tumor cells in vitro. These tumor sensitized and SAg activated T cells are used for adoptive immunotherapy of cancer as given in Examples 60.

[0561] The DNA and RNA from tumor cells transfected with nucleic acids encoding SAg and viral epitopes, or dendritic cells after ingestion of SAg transfected tumor cells are extracted and used as naked DNA constructs for in vivo cancer therapy as in Examples 30-34, 60. While the viral epitopes HPV-E-6 and E7 are exemplified herein, the method is applicable to other viral epitopes which are known to be associated or etiopathogenic in the malignant state including but not limited to adenovirus, EB virus, herpesvirus, hepatitis B, cytomegalovirus and Kaposi's sarcoma epitopes.

[0562] Adenovirus Containing Superantigen Linked to Modified Form of IκBα.

[0563] The superantigen gene is linked the gene expressing a modified form of IκBα and inserted into a viral vector such as adenovirus, vaccinia or any of the well established viral vectors well known in the art and transfected into tumor cells. The modification of IκBα blocks its ability to be phosphorylated and to be subsequently degraded, thereby preventing NFκB activation and translocation to the nucleus. In the absence of NFκB activation exogenous TNFα induces apoptosis in the IκBα treated tumor cells. The virus also induces lysis of the tumor cells and concurrently release of the SAg polypeptides and nucleic acids from tumor cells activates tumoricidal macrophages, induces a necrotizing inflammatory response which stimulates a T cell tumoricidal response.

[0564] SAg-viral constructs are prepared by methods given in Example 60. The SAg-viral constructs are administered intratumorally or parenterally in the tumor models as given in Examples 60.

### 51. Augmented Immune Response to Cancer and Infectious Diseases: Deletion/Inactivation of Immunocyte Inhibitory Receptors and Receptor Tyrosine Based Inhibitory Motifs (ITIMs)

[0565] Many lipid-based tumor associated antigens (collectively Lip-TAAs) consist of lipids, glycolipids, gangliosides, sphingolipids and lipopeptides, all of which are weak immunogens and fail to evoke effective tumoricidal immune responses. The same may be said of lipid based antigens associated with infectious organisms. For example, tumor gangliosides on the surface or shed from tumor cells actually suppress T cell and antigen presenting or accessory cell function. The present invention provides an approach directed at inhibitory receptors (IRs) and their inhibitory motifs, described below, which recognize (1) Lip-TAAs, (2) lipid-based infectious disease associated antigens (Lip-IDAs) and (3) superantigens (SAgs) or self molecules associated with superantigens (“SagSMs”). Deletion or inactivation of these IRs or their inhibitory motifs by pharmacologic or genetic means results in an enhanced cellular response to tumors or infectious organisms. The IRs specific for Lip-TAAs, Lip-IDAs and SAgSM are abbreviated, respectively, IR_{TAA}, IR_{IDA} and IR_{SAg}.

[0566] Lipid antigens are presented to cells of the immune system in the context of their natural antigen-presenting receptors, such as CD1 or attached to lipoproteins. The present invention is designed to deactivate or eliminate the inhibitor receptors (IR_{TAA}, IR_{IDA} and IR_{SAg}) on T cells, NK cells and NKT cells, all of which inhibit responses to lipid antigens presented in the context of CD1 or a suitable surrogate, prior to exposure of these cells to a specific Lip-TAA, Lip-IDA or SAgSM. The IRs recognize and respond to the same Lip-TAAs+self (e.g., CD1 or MHC) as do activation receptors with, among other consequences, an inhibitory signal to the activation receptor after activation receptor engagement by its ligand. The cell populations bearing such IRs include but are not limited to T cells, NK cells and NKT cells. Antigen presenting or accessory cells (APCS) including but not limited to macrophages, dendritic cells and fibroblasts also express IR_{TAA}, IR_{IDA}

[0567] After exposure to Lip-TAAs, a responding cell such as a T cell, NK cell or NKT cell devoid of an IR_{TAA} becomes tumoricidally activated due to the unopposed stimulation of activation receptors. This is particularly advantageous when the stimulus is a weakly immunogenic Lip-TAA which binds to IRs. Similarly after exposure of APCs to Lip-TAAs, a responding cell devoid of an IR_{TAA} becomes capable of processing, expressing and presenting LipTAAs (and in the case of macrophages become tumoricidally activated) due to the unopposed stimulation of activation receptors to LipTAAs. Likewise, after exposure to Lip-IDAs, responding T cells, NK cells or NKT cells devoid of IR_{IDA}s become cytolytic for (or otherwise destructive of) the infectious organism bearing the Lip-IDA. Similarly, if a Lip-TAA or Lip-IDA are physically associated, for example, genetically fused or chemically conjugated, to a SAgSM, after exposure to a combination of the SAgSM and the Lip-TAA or Lip-IDA, responding cells lacking the IR_{SAg} (and lacking IR_{TAA} or IR_{IDA}) become hyperresponsive to these antigens.

[0568] Inhibitory Receptors (IRs) and their Motifs

[0569] Most of the IRs are members of one of two protein families: (1) Type I integral membrane proteins belonging to the Ig superfamily, and (2) Type II integral membrane proteins of the C type lectin superfamily, expressed as disulfide linked homodimers or heterodimers. These IRs are inert when self-aggregated but are able to abolish cellular signaling when co-ligated to activation receptors. Their cytoplasmic domains contain one or more motifs termed “immunoreceptor tyrosine-based inhibition motifs” or ITIMs, defined by the six-amino acid sequence (ILV)xYxx(LV) (where x is any amino acid). ITIM sequences are phosphorylated upon receptor co-ligation to create a binding site for cytoplasmic factors with SH2 domains that can transmit the inhibitory signal intracellularly. When phosphorylated, IRs recruit one or more types of tyrosine phosphatases, such as SHP-1, which dephosphorylates molecules in the activation cascade. All the identified families of IRs with specificity for MHC class I molecules have ITIM sequences in their cytoplasmic tails.

[0570] ITIM Sequences in their Cytoplasmic Tails.

[0571] For each IR, there exists a counterpart activating receptor with a highly homologous extracellular domain and a short cytoplasmic tail that lacks signaling capacity. The transmembrane domains of these activation receptors are characterized by the presence of a charged amino acid, a hallmark of receptors that associate with accessory subunits containing the immunoreceptor tyrosine-based activation motif (ITAM). ITIM-bearing receptors commonly inhibit activating signals triggered by receptors with an ITAM in their cytoplasmic tails, for example, B cell Ig receptors, TCRs, and Fc receptors (FcRs).

[0572] Cell activation mediated by ITAM-containing receptors involves phosphorylation and activation of several tyrosine kinases and subsequent activation of phospholipase Cγ (PLCγ) and phosphatidylinositol 3-kinase (PI3-K), together leading to the production of phosphoinositol messengers and a mobilization of intracellular Ca²⁺ and a sustained increase in cytoplasmic Ca²⁺ levels. Engagement of an IR has a dominant effect, blocking the activation of an activation receptor. In the immune system, this has effects of blocking of cytotoxicity (by T, NK and NKT cells) and cytokine production.

[0573] IRs use two different pathways to terminate cell activation depending on the type of molecule that is recruited to the phosphorylated ITIM sequences:

[0574] (1) protein dephosphorylation mediated by tyrosine phosphatases, including SHP-1 and SHP-2, which abrogate the most proximal events in the activation cascade resulting in the abolition of Ca²⁺ mobilization, and

[0575] (2) an inhibitory signal is generated via phosphoinositol phosphatase SHIP which hydrolyzes phosphoinositol messengers.

[0576] This latter signal does not affect proximal events triggered by the activating receptor, such as the activation of kinases, receptor phosphorylation, or Ca²+ release from intracellular stores. Rather, it specifically impedes extracellular Ca²⁺ influx and therefore blocks a sustained increase in cytoplasmic Ca²⁺.

[0577] SHP-1, SHP-2 and SHIP, recruited by IRs, are associated with antigen-binding receptors, Fc receptors, growth factor and cytokine receptors, and their loss, deficiency or absence results in augmented cell activation and proliferation. These phosphatases do not function through recruitment to IRs, but rather via association with stimulatory receptors to set thresholds or to prevent unsolicited cell activation. The dissociation of an antigen from molecules recruited by SHP-1, SHP-2 and SHIP would abort a negative signal and augment cell reactivity, in particular to antigens of tumors and infectious organisms as well as to SAgs.

[0578] Augmented Immune Response to Tumors and Infectious Agents: Dual Inactivation or Deletion of IR_{TAA}s or IR_{IDA}s and SAgSMs and their ITIMs

[0579] In the present invention, deactivation or deletion of IRs in T cells, NK cells, NKT cells or APCs is accomplished either ex vivo, in vivo or both, prior to exposure to the Lip-TAAs (Examples 51 and 52). This effect is achieved by several approaches, including, but not limited to, the use of a specific antibody or antibody fragment directed to the IR(s), gene knockout, e.g., by homologous recombination exposure to an antisense nucleotide or siRNA. Deletion of IRs leads to a significant enhancement of T cell activation in response to Lip-TAAs and SAgs. In particular, the immune cells with deleted IRs are capable of responding to subdominant and dominant Lip-TAAs on tumor cells, differentiating into effector cells such as CTL, and secreting cytokines that contribute to the tumoricidal response. The APCs deleted of IR are capable of, processing and presenting Lip-TAAs (expressed on or shed by tumor cells) to immune cells such as T cells, NK cells or NKT cells. Macrophages deleted of IRs become tumoricidally activated.

[0580] When stimulated, the IR_{TAA}, IR_{IDA}, IR_{SAg} and their respective ITIMs inhibit cellular activation by the activation receptors that are specific for Lip-TAAs. The IR_{TAA}s and IR_{IDA}S on α/β TCR-bearing T cells confer specificity, respectively, for Lip-TAAs and Lip-IDAs (for inhibitory signalling), optionally in the context of a CD1 or a CD1 isoform. Sequence analysis of a panel of CD1-restricted, lipid-specific inhibitory TCRs on TCR positive cells reveals the incorporation of template-independent N nucleotides that encode diverse sequences and frequent charged basic residues at the V(D)J junctions. The TCR CDR3 loops containing charged residues project between the CD1 α-helices, contacting the lipid antigen hydrophilic head moieties as well as adjacent CD1 residues in a manner that explains antigen specificity and CD1 restriction.

[0581] The IR_{TAA}s respond specifically to Lip-TAAs, including fatty acids, ceramides, glycolipids, sphingolipids, glycosphingolipids, phosphosphingolipids, gangliosides, sialylated glycans and lipopeptides. IR_{TAA}s also recognize sialic acid and carbohydrates in Lip-TAAs. Sialic recognition is exemplified by Siglecs (sialic acid binding lectins), carbohydrate recognition by some C type lectins both with ITIMs in their cytoplasmic tail. The sialic acid binding region of Siglecs is localized within the membrane-distal, amino-terminal domain. Each Siglec preferentially recognizes aspects of its sialylated ligands, such as the side chain, the N-acyl group, the linkage from the 2-position, and sometimes the underlying sugars Recognition involves the entire sialic acid molecule, including the carboxylate group at the 1-position, the linkage from the 2-position, the N-acyl group at the 5-position, and the exocyclic hydroxyl groups at the 7-, 8-, and 9-positions.

[0582] IR_{IDA}s recognize Lip-IDAs derived from bacteria, mycobacteria, parasites, fungi, protozoans or plants and respond by producing an inhibitory T cell response. Lip-IDAs comprise sphingolipids, glycopeptides, phytoglycolipids, mycoglycolipids, lipoarabinans, mycolic acids, Braun's lipopeptide, inositolphosphorylceramides and plant phosphatidylinositol. Sphingolipids with inositolphosphate-containing head groups showing the general structure of ceramide-P-myoinositol-X (with X referring to polar substituents), including ceramide-p-inositol-mannose, inositol-1-P-(6)mannose(α1,2inositol-1P-(1)ceramide, (inositol-P)2-ceramide, inositol-P-inositol-P-ceramide and inositol-P-inositol-P-ceramide are also useful in native form or naturally conjugated to GPI to activate T cell activation and inhibitory TCRs.

[0583] The present invention contemplates the dual deletion or inactivation, in the same cells, of the IRs along with their respective ITIMs. Deletion or inactivation of these IRs augments the cell's responses to a tumor or an infectious agents after exposure to Lip-TAAs or Lip-IDAs together with SAgSM. The lipid-based antigens are also immunogenic when conjugated or fused to SAgSM or to free SAg.

[0584] Inhibitory receptors with cytoplasmic ITIMs which would be amenable to deletion of their IRTAA and ITIMs include but are not limited to those described below.

[0585] 1. Sialic Acid Binding Lectins (Siglecs) are described in section 56.

[0586] 2. Leukocyte associated Ig-like receptor-1 (LAIR-1) is a surface molecule expressed on human mononuclear leukocytes that functions as an inhibitory receptor on human NK cells. It is also expressed on T cells, B cells, macrophages, and dendritic cells. It is a type I transmembrane glycoprotein with a single If-like domain in the extracellular region and a cytoplasmic tail containing two ITIMs. Cross-linking of LAIR-1 on NK and T cells delivers an inhibitory signal that decreases target cell lysis. Some of the family members bind MHC class I molecules or viral MHC class I homologues. This group of receptors has not been shown to have reactivity or specificity for Lip-TAAs.

[0587] 3. Killer cell inhibitory receptors (KIR) are a family of type I integral membrane protein in the Ig superfamily expressed on the surface of subsets of human NK and CD4+ and CD8+ T cells, predominantly CD28+ memory cells. They recognize to public epitopes formed by polymorphisms at the C terminal portion of al helix of class I HLA-B and HLA-C alleles. Upon binding to HLA class I molecules KIRs prevent activation of NK cells. KIR binding to polymorphic HLA-B and HLA-C inhibits production during SAg T cell stimulation (IR_{SAg}s) diminishes the production of SAg-induced effector T cells.

[0588] Each KIR of the Ig superfamily has two ITIM sequences (YxxL) separated by a stretch of about 26-28 amino acids. These ITIM motifs (discussed above) are critical for the inhibitory signals generated upon binding to a class I ligand. These KIRs generate a negative signal by recruiting and activating two protein tyrosine phosphatases containing a Src homology region 2 (SH2) domain, SHP-1 and SHP-2. (Whereas the KIR inhibitory signal utilizes SIIP-1, the signal of another IR, FcγRII, depends on the phosphoinositol phosphatase SHIP). These tyrosine phosphatases dephosphorylate molecules in the activation cascade and thereby counter the stimulatory effects of the tyrosine kinases associated with activation pathways. SHP-1 binds preferentially to the sequence VxYxxL. The more N-terminal ITIM (VTYAQL) binds to both SH2 domains of SHP-1, and does so more avidly than does the C-terminal ITIM (IVYELL). The N-terminal ITIM appears to be sufficient for the inhibitory signal.

[0589] 4. Dendritic cell immunoreceptor (DCIR) is a type II membrane glycoprotein with a single carbohydrate recognition domain(CRD). It contains ITIMs in their cytoplasmic tails. DCIRs are strongly expressed on dendritic cells, monocytes, macrophages, B lymphocytes, and granulocytes but not on NK or T cells. These receptors do not recognize gangliosides or sialylated glycans.

[0590] Engagement of the IR has a dominant effect, blocking activation. KIRs inhibit the lytic function of CTLs activated by bacterial SAgs and regulate other T cell responses. Hence, one consequence of disrupted KIR recognition of self-class I molecules is increased T cell cytokine production in response to SAg stimulation.

[0591] 5. Immunoglobulin-like transcripts (ILTs) are closely related to KIRs, bind MHC class I molecules and also contain ITIM sequences in their cytoplasmic tails. Neither KIRs nor ILTs have been shown to have reactivity or specificity for Lip-TAAs.

[0592] 6. PD-1 is a type one transmembrane protein with an extracellular region consisting of a single IgG-like variable (IgV) domain. It is an inhibitory member of the CD28 family. As with the other CD28 family members, its ligands, PD-L1 and PD-L2, are related to the B7 proteins. PD-1 is expressed on activated B and T cells, and engagement of PD-1 has been shown to inhibit T cell proliferation and cytokine production in response to anti-CD3 and anti-CD28 antibody stimulation. Mice deficient in PD-1 expression develop autoimmune disorders characterized by production of high titers of autoantibodies, indicating an important role in the regulation of autoreactive B cells. Unlike CTLA-4, the cytoplasmic tail of PD-1 contains a immunoreceptor tyrosine-based inhibition motif. The ITIM sequence like those found in several other classes of inhibitory receptors, including the killer inhibitory receptors found on NK cells and FcγRIIB on B cells, and functions by recruiting SH2-containing phosphatases. There appear to be receptor and cell type specificities in the identity of the phosphatase (SHP-1, SHP-2, or SHIP) recruited by the ITIM motif. It is unknown which phosphatase is involved in PD-1 function, although, as with CTLA-4, there is some evidence for preferential activation of SHP-2. This system is active at low antigen concentrations inhibiting strong B7-CD28 signals. Hence, this system is likely to be activated early in tumor growth when relatively low concentrations of TAA and IR_{TAA} are exposed to T cells resulting in the well known antigen specific hyporesponsiveness characteristic of this phase of tumor growth.

[0593] 7. B7-H1 is a cell surface glycoprotein belonging to the B7 family of costimulatory molecules. It is expressed on a wide variety of tumor cells including colon, lung, ovarian and breast carcinoma after exposure to IFN-γ. Cancer cell associated B7-H1increases apoptosis of antigen specific T cell clones and promotes growth of tumor cells. The apoptotic effect is mediated largely by one or more receptors other than PD-1. It is possible that the inhibition is related to activation of an ITIM sequence (as yet unidentified) that is part of the immunoregulatory costimulation network activated by antigens presented in the context of CD-1.

[0594] In one embodiment, this invention provides a population of immunocytes and APCs that are hyperresponsive to Lip-TAA and SAgs. These cells have been modified by functionally inactivating ITIMs (or the SH-2- or SHIP-binding sites thereof) in IR_{TAA}. IR_{IDA} and IR_{SAg} using (a) pharmacologic agents, (b) specific (intracellular) antibodies and (c) gene knockouts.

[0595] In another embodiment, the IRs are deleted or inactivated in vivo or ex vivo before exposing the cells to Lip-TAAs or SAgs by providing an antisense molecule which inactivates the relevant inhibitory ITIM or related signaling sequences. Cells treated in this way will then be activated in vivo when exposed to (1) Lip-TAA expressed endogenously on tumor cells or as exogenous purified Lip-TAA preparations; (2) Lip-IDAs derived from infectious agents and expressed endogenously on the organisms or as exogenous purified Lip-IDA preparations; or ( 3) SAg. Lip-TAAs, Lip-IDAs or SAgSM are thus used in vivo as preventive vaccines or as therapeutic agents in the treatment of established cancer or infectious disease (Example 54). Alternatively, IR_{TAA}S, IR_{IDA}S, IR_{SAg}S or their respective ITIMs on cells of the immune system (including T cells, NK cells, NKT cells) and antigen presenting cells (including macrophages, dendritic cells, fibroblasts) are deleted or inactivated ex vivo using methods described in Examples 51 and 52. Thereafter, these cells are exposed to Lip-TAAs, Lip-IDAs or SAgSM as in Examples 53 and 54. When it is desired to augment immune responsiveness to Lip-TAA or Lip-IDAs and SAgSM, cells are exposed to those molecules simultaneously or sequentially as described in Example 54.

[0596] Deleterious side effects such as uncontrolled T cell activation and autoimmune responses by cells depleted of their IRs in vivo are prevented or minimized by ex vivo transduction of cells having the deactivated or deleted IRs with the HSV thymidine kinase gene. Such transduced cells become susceptible to killing by ganciclovir in vivo as described in Example 56, providing a “suicide” type mechanism to control these cells' actions.

[0597] Any IR_{TAA}, IR_{IDA}, IR_{SAg} can be inactivated or deleted (by the methods of Examples 51 and 52) regardless of whether it is a member of one or another recognized or new receptor superfamily or subfamily, as long as the IR retain its functional properties and results in augmented responses to Lip-TAAs, Lip-IDAs and SAgSM (Examples 53, 54).

### 52. Deletion of Lip-TAA, Lip-IDA & SAgSM Motifs which Selectively Bind and Activate IR_{TAA}s, IR_{IDA}s and IR_{SAg}s

[0598] The structural motifs in the Lip-TAA, Lip-IDA and SAgSM molecules which are responsible for selective binding to IR_{TAA}S, IR_{IDA}s and IR_{SAg}s and for generating an inhibitory signal, termed “antagonist motifs,” are deleted from the Lip-TAA, Lip-IDA and SAgSM molecules. In this way, the remaining agonist motifs selectively bind and stimulate the activating receptors (e.g., via activity at their ITAMs) without activating the dominant IRs or their ITIMs. This results in enhanced signaling and activation of the immune cell population in response to weakly immunogenic Lip-TAAs, Lip-IDAs and SagSM (as well as with free SAgs.

[0599] In another embodiment, the approach of the present invention is to functionally inactivate, in a reversible manner, the molecules in the enzymatic pathway that produce activation of the IR following exposure to Lip-TAAs, Lip-IDAs or SAg, preferably the various phosphatases described above. This can be accomplished preferentially using gene silencing RNA interference molecules targeting the coding sequences of the IR (Example 74). Additional method s for deletion include intracellular antibodies, gene knockout via antisense (Examples 51 and 52). This leads to unopposed signaling by the activation receptor and cellular hyperresponsiveness to the lipid-based antigens, SAgSM or SAg.

### 53. Deletion of Nucleic Acids Encoding IR_{TAA}s, IR_{IDA}s, IR_{SAg}s, their ITIMs or Fas Genes

[0600] The present invention provides a cell of the immune system or an accessory cell depleted not only of IR_{TAA}S, IR_{IDA}s, IR_{SAg}s but also devoid of Fas receptors. Such a cell is (a) hyperresponsive to Lip-TAAs, Lip-IDAs and SAgSM or free SAgs, and (b) resistant to apoptotic signals from tumor cells that secrete Fas ligand. Therefore, when administered to a subject, these cells manifest their tumoricidal properties even while penetrating tumor tissue without being subject to inactivation induced by the high local concentration of gangliosides released from the tumor or apoptosis due to Fas ligand secreted by the tumor cells. The deletion or functional inactivation of the Fas gene in cells of the immune system, including T cells, NK cells and NKT cells, is accomplished ex vivo preferentially by RNA interference using siRNA targeting the RNA coding sequence FAS (Example 74) or by homologous recombination or using antisense oligonucleotides (Examples 51 and 52). These apoptosis-resistant, hyperresponsive cells are useful for adoptive immunotherapy of cancer (Examples 2-5, 7, 15, 16 18-23, 54).

### 54. Genes Encoding IR_{TAA}, IR_{IDA}, IR_{SAg}, ITIMs and ITAMs

[0601] Genes encoding the IRs and their ITIMs are cloned using conventional techniques. Their size and chromosomal location are determined using well established methods. It is predicted that the ITIMs represent no more than about a 40 base pair segment. In the present invention, genes encoding IR_{TAA}s, IR_{IDA}s, IR_{SAg}s and their ITIMs including but not limited to ITIM sequences in Siglecs, LAIRs, KIRs, DCIRs, ILTs and PD-1s are deleted or inactivated in immunocytes and APCs in vivo or ex vivo preferentially by RNA interference targeting the coding sequences of in Siglecs, LAIRs, KIRs, DCIRs, ILTs and PD-1s (Example 74) or by antisense methodology (Examples 51 and 52). These cells are then exposed to Lip-TAAs, Lip-IDAs and SAgSM or free SAgs in vivo or ex vivo (Example 53, 54). The ex vivo treated immune system cells are used for adoptive immunotherapy of cancer and infectious disease (Examples 2-5, 7, 15, 16 18-23, 53, 54).

### 55. Therapeutic Composition: SAg or SAgSM Conjugated to Lip-TAAs and Lip-IDAs

[0602] In one embodiment, SAgs are chemically conjugated to Lip-TAAs (of the types listed above). In another embodiment, SAgs are conjugated to Lip-IDAs such as glycans and peptidoglycan antigens derived from bacteria, mycobacteria, parasites, fungi or plants. These families are listed above. These lipid based molecules also include sphingolipids with inositolphosphate-containing head groups as listed above. These molecules are used in native form or may be conjugated to GPI structures. They may be obtained by isolation from shed membranes, exosomes, or vesicles of the native organism. Example 55 describes extraction and purification of these lipids. SAg-Lip-TAA or SAg-Lip-IDA conjugates are prepared by methods of Examples 4-5. For immunization, these conjugates may be used alone or loaded onto soluble CD1 receptors or onto the surface of APCs (Example 5). Example 5 also describes these conjugates with attached GPI, fused to cell membranes, for example, tumor cell or erythrocyte membranes. In this form, the conjugates are used to activate T cells, NKT cells or NK cells.

[0603] These conjugates are used in vivo as therapeutic antitumor vaccines according to Examples 14, 15, 16, 18-23. They are also useful ex vivo for producing a population tumoricidal T cells, NK cells or NKT cells for adoptive immunotherapy of cancer (Examples 2-5, 7, 15, 16, 18-23). They are used ex vivo to activate cells in which IR_{TAA}, IR_{IDA} or IR_{SAg} have been deleted such as by siRNA-RNA interference preferentially-Example 74, gene knockout-Examples 51,52 or antisense-treatment, Example 53, 54. These hyperresponsive immune cells are then infused into the subject using protocols set forth in Examples 15, 16, 21, 23, 53, 54.

[0604] Conjugates between SAg and a Lip-IDA derived from a fungal, parasitic or mycobacterial sources are also used for the treatment of infectious diseases such as tuberculosis, leishmaniasis, trypanosomiasis as disclosed in Example 53. They are also useful ex vivo for activating a population of cells in which IR_{IDA}s specific for bacterial, fungal, parasitic or mycobacterial antigens have been (1) deleted (via gene knockout) or (2) functionally inactivated (via antisense) for use in adoptive immunotherapy of infectious disease (Examples 51, 52, 53).

### 56. Lip-TAA Receptors and Receptor Mimics for Binding Lip-TAAs in Tumor Bearing Hosts Immunosuppressive Lip-TAAs

[0605] Lip-TAAs consist of sialic acid-containing glycosphingolipids; gangliosides, which are potent inhibitors of the immune response. Synthesized and shed in particularly high amounts by tumor cells, these molecules have been shown to enhance tumor formation and progression in vivo. In the tumor cell microenvironment and ultimately in the circulation associated with low density lipoprotein molecules, tumor gangliosides are mediators of tumor-related host immune suppression. Tumor gangliosides and glycosphingolipids (LipTAAs) are known to suppress antigen or mitogen induced T or NK cell activation, cytotoxic T cell generation and monocyte accessory cell function. Indeed, tumor production and shedding gangliosides in the course of tumor growth is one explanation for the tumor antigen specific immunosuppression which appears within a few days after tumor implantation. For tumor ganglioside induced T cell inhibition, ceramides with C16-C18 fatty acyl groups are more immunosuppressive than those with longer fatty acyl chains and the presence of the sialic acid is required.

[0606] Immunocytes

[0607] LipTAAs have also been shown to modulate expression of lymphocyte surface molecules CD2, CD3, CD4, CD5, and CD8. They interact directly with T cells to induce T cell suppression of lymphoproliferation in response to mitogen or antigen primed monocytes. They inhibit cytotoxic effector function, trigger endocytosis of the CD4 molecule and interfere with the binding of IL-2 to its T cell receptors. Dephosphorylation of the T cell retinoblastoma protein (pRB) via phosphatase activation is an additional mechanism of the immunosuppressive effect.

[0608] Antigen Presenting Cells

[0609] LipTAAs induce a specific, non-toxic and reversible inhibition of the capacity of human monocytes to induce a MIIC class II-restricted T-cell proliferative responses in vitro. This accessory cell function is a key initial step in the induction of a cellular immune response to LipTAAs. Inhibition of accessory cell function occurs after antigen processing at the step of antigen localization to the APC MHC receptor. LipTAAs inhibit the production of IL-1β, TNF α and IL-6 by stimulated adherent cells. They interfere with dendropoiesis and the expression of costimulatory molecules CD80, CD83, CD86 on antigen presenting cells and dendritic cells, in which case tumor associated antigens presented in the absence of costimulation induce specific T cell tolerance.

[0610] Sialic Acid Binding Ig-Superfamily Lectins (Siglecs) Receptors, Homologues or Mimics

[0611] Siglecs (sialic acid binding Ig-superfamily lectins) are a multigene family of sialic acid binding proteins, each with a distinct specificity for the type of sialic acid recognized and its linkage to subterminal sugars. The family consists of sialoadhesin (siglec-1) localized to macrophages, CD22 (siglec-2) to B cells, CD33 (siglec-3) to myelomonocytic cells, myelin-associated glycoprotein or MAG (Siglec 4a)/Schwann cell myelin protein or SMP (siglec-4b) to oligodendrocytes and Schwann cells in the nervous system, Siglec-5 to neutrophils and monocytes Siglec-6/OBBP-1 to B cells and placental trophoblasts and Siglec-7 expressed in spleen, peripheral blood leukocytes and liver. Siglec-3, 5, 6, 7 bear an extracellular sialic acid binding site and an intracellular ITIMs (tyrosine-based inhibitory motif). Siglec binding sites for sialic acid are often masked by endogenous ligands and can be unmasked by transfection of sialyltransferases, sialidase treatment or cellular activation.

[0612] Structurally, Siglecs are a group of cell surface immunoglobulin superfamily lectins and a subset of the “1” type lectins which bind sialic acid. Family members each have a single V-set NH₂-terminal Ig domain followed by a variable number of C2-set Ig domains, as many as 16 for sialoadhesin, or as few as one for CD33. The V- and adjacent C2-set domains display an unusual conserved pattern of three cysteines in each domain. These result in an intra-□β-sheet disulfide bond in the V-set domain, a predicted interdomain disulfide and a canonical inter-β-sheet disulfide within the C2 set domain. The postulated interdomain disulfide is a unique feature of the siglec family.

[0613] There is significant amino acid and nucleotide sequences homology among the Siglec 1-7. cDNAs for all of the Siglecs are known (See Example 58). Siglecs 3, 5, 6 and 7 form a closely related cluster. Siglec family members CD33-or Siglec 3, Siglec 5, Siglec 6, and Siglec 7 contain a conserved consensus sequence surrounding the intracellular tyrosine residues of all four of these molecules [E(I/L)xYAxL-(12-18 residues)-(T/N)EYSE(I/V)(K/R)]. As with Siglec-2 and 4a, the cytoplasmic tail of Siglec-3 is tyrosine-phosphorylated upon engagement. Once the tyrosines are phosphorylated, the first one is part of an ITIM (Immunoreceptor Tyrosine-based Inhibitory Motif; consensus: L/I/V/SxYxxLN), which is found in many members of the Ig superfamily (including Siglec-2/CD22), and forms a potential docking site for the SHP-1 tyrosine phosphatase. The second tyrosine-containing motif [(T/N)EYSE(I/V)] is similar to the sequence (TxYxxI/V) reported in SLAM, an immunoregulatory molecule of the Ig superfamily. This motif is the docking site in SLAM for an SH2-containing molecule SAP (SLAM-associated protein), which blocks recruitment of the tyrosine phosphatase SHP-2 to its docking site in the SLAM cytoplasmic region. A similar interplay occurs between the recruitment of phosphatases to the ITIM motif in Siglecs and the presence; of SAP or SAP-like inhibitors to the SAP binding motif.

[0614] In contrast to the majority of immunoglobulin superfamily members which recognize protein ligands, Siglec family members have all been shown to bind to specific sialylated glycans. Each Siglec recognizes aspects of its sialylated ligands, such as the side chain, the N-acyl group, the linkage from the 2-position, and sometimes the underlying sugars Whereas CD22 strongly prefers glycans terminating in the Siaα2-6Gal, the other members of the family bind to Siaα2-3-Gal-terminating structures. Sn preferentially interacts with cells of the granulocytic lineage and MAG with neuronal processes. Siglec-6 has a protein ligand, i.e., leptin. For sialoadhesin (Siglec 1) and MAG (Siglec 4a), specific cell populations bearing their cognate ligands are granulocytic lineage cells and neuronal processes respectively.

[0615] The sialic acid binding property of the family is mediated primarily by an amino-terminal V-set Ig domain, with some contribution by the next C2-set domain. Recognition involves the entire sialic acid molecule, including the carboxylate group at the 1-position, the linkage from the 2-position, the N-acyl group at the 5-position, and the exocyclic hydroxyl groups at the 7-, 8-, and 9-positions. Arginine present in all the Siglecs is essential for sialic acid-dependent binding. Other important interactions include hydrophobic contacts between conserved aromatic amino acids on the A and G B strands of the V set domains with the N-acetyl and glycerol side groups of N-acetyl-neuraminic acid. For Sn and CD22, the binding site has been mapped to the GFCC′ face of the V-set domain by site directed mutagenesis. In the center of this site is an arginine residue which is found in all members of the Siglec family. The high sequence similarities in this area suggests that it represents the binding site also in MAG, SMP and CD33. For MAG the Arg residue is necessary for the binding of sialylated glycans.

[0616] Myelin Associated Glycoprotein (Siglec 4a)

[0617] The ligands for myelin-associated glycoprotein (MAG, Siglec 4a) are a limited set of structurally related gangliosides, known to be expressed on myelinated neurons in vivo. The neural sialoadhesins, myelin associated glycoprotein (MAG) and Schwann cell myelin protein (SMP), had similar and stringent binding specificities. Each required an α2,3-linked sialic acid on the terminal galactose of a neutral saccharide core, and they shared the following rank-order potency of binding: G_{Q1ba}>>G_{D1a}=G_{T1b}>>G_{M3}=G_{M4}>>G_{M1}, G_{D1b}, G_{D3}, G_{Q1b} (nonbinders). Major brain gangliosides G_{T1b} and G_{D1a} adhere to MAG. The simplest ganglioside ligand for MAG is G_{M3} bearing N-acetylneuraminic acid, whereas G_{M3} bearing N-glycolylneuraminic acid did not support adhesion. The simplest ganglioside ligand for MAG is G_{M3} bearing N-acetylneuraminic acid, whereas G_{M3} bearing N-glycolylneuraminic acid did not support adhesion. G_{Q1b} alpha expressed on cholinergic neurons, is more potent than G_{T1b} or G_{D1a} in supporting MAG-mediated cell adhesion. An alpha 2,3-N-acetylneuraminic acid residue on the terminal galactose of a gangliotetraose core is necessary for MAG binding, and additional sialic acid residues linked to the other neutral core saccharides [Gal(II) and GalNAc(III)] contribute significantly to binding affinity. Binding is enhanced by pretreatment of MAG-expressing cells with neuraminidase. For MAG, the specific cell populations bearing its cognate ligands are neuronal processes.

[0618] Sialoadhesin

[0619] Sialoadhesin had less exacting specificity, binding to gangliosides that bear either terminal α2,3- or α2,8-linked sialic acids with the following rank-order potency of binding: G_{Q1ba}>G_{D1a}=G_{D1b}=G_{T1b}=G_{M3}=G_{M4}>G_{D3}=G_{Q1b}>>G_{M1}. In the case of sialoadhesin (Siglec-1), a crystal struct has been elucidated in the presence of bound ligand, confirming that all of these aspects of the sialic acid molecule are actually in direct contact with the binding site. Target ligands for the sialoadhesins are glycoconjugates in which a terminal sialic acid is essential for binding. Sialoadhesin binds predominantly to terminal α2,3-linked sialic acids, although weaker binding to α2,8-linked sialic acids was demonstrated. In contrast, CD22 bound only to α2,6-linked sialic acids, whereas MAG and CD33 bind only to α2,3-linked sialic acids. Among structures with α2,3-linked sialic acids, MAG bound preferentially to “3-0” structures (NeuAc α2,3Galβ1,3GalNAc), which are common termini on gangliosides (the major sialoglycoconjugates of the nervous system) and 0-linked glycoproteins. Sialoadhesin and CD33 bound similarly to “3-0” and “3-N” (NeuAc α2,3Galβ1,4GlcNAc) structures.

[0620] CD22 (Siglec 2)

[0621] CD22 (Siglec 2) a B lymphocyte antigen preferentially binds to glycans terminating in Siaα2-6Gal and glycoconjugates terminating in sialic acid. The minimal structure recognized by this lectin is the trisaccharide Siaα2-6Galβ1-4GlcNAc, as found on N-linked, 0-linked, or glycolipid structures. One prominent ligand for CD22 is the highly glycosylated leukocyte surface protein CD45. CD22 binds to the sialoglycoconjugate NeuAcα2-6Galβ1-4GlcNAc carried on CD45-thy N-glycans. The other members of the family bind to Siaα2-3Gal-terminating structures. Specifically, the critical features required for CD22 binding include the exocyclic hydroxylated side chain of the Sial residue and the αC2-6 linkage position to the underlying Gal unit. CD22 expressed on cell surfaces is structurally and functionally a multimeric protein, demonstrating a higher apparent affinity for multiply sialylated compounds over monosialylated compounds.

[0622] CD33 (Siglec 3)

[0623] CD33 is a member of the Ig superfamily that is restricted to cells of the myelomonocytic lineage but whose functions and binding properties are unknown. It shares sequence similarity with sialoadhesin, CD22, and the myelin-associated glycoprotein which constitute the sialoadhesin family of sialic acid-dependent cell adhesion molecules. CD33 is a fourth member of this family. A recombinant soluble form of CD33, Fc-CD33, bound red blood cells with a specificity similar to that of sialoadhesin, preferring NeuAc2,3Gal in N-and 0-glycans over NeuAcα2,6Gal in N-glycans. Pretreatment of the CD33-transfected cells with sialidase rendered them capable of mediating sialic acid-dependent binding. CD33 can function as a sialic acid-dependent cell adhesion molecule and that binding can be modulated by endogenous sialoglycoconjugates when CD33 is expressed in a plasma membrane.

[0624] The Siglec polypeptide family of receptors, homologues or mimics are prepared from their cDNAs using recombinant techniques as in Example 58. These receptors are used to bind circulating immunosuppressive Lip-TAAs in vivo. They are expressed as part of a chimeric receptor with additional molecules such as Fc fragments which facilitate the removal of Lip-TAAs from the tumor bearing host. They are also useful when administered in advance of T cells, NK cells or APCs in which IR_{TAA}, IR_{IDA} inhibitory receptors have been deleted ex vivo (e.g., via gene knockout) or inactivated (e.g., via antisense) Example 58.

[0625] Additional Lip-TAA Binding Molecules:

[0626] Prosaposin (SAP precursor) exists as an integral membrane protein bound by a mannose-6-phosphate-independent mechanism. Prosaposin is the precursor or four smaller lysosomal saposin A, B C and D proteins. Both prosaposin and mature saposins interact specifically with glycolipids and serve as nonenzymatic cofactors in the hydrolysis of glycosphingolipids by acidic glycosidases. As a family they are known as sphingolipid activator proteins. Prosaposin is the only member of the saposin family with an extralysosomal location existing as a membrane bound or secretory protein. It exhibits ubiquitous expression, evolutionary conservation, and diverse tissue inducibility.

[0627] The function of the secreted form of prosaposin is as a glycolipid binding and transfer protein in vivo. Prosaposin and saposins are capable of transferring gangliosides from donor liposomes to acceptor membranes including erythrocyte ghost membranes. With its four lipid binding domains prosaposin forms clusters with certain sphingolipids in the plasma membrane and regulates their endocytosis and degradation. Prosaposin, but not mature SAPs, has been detected inhuman secretory fluids like cerebrospinal fluid, semen, milk, pancreatic juice, and bile. In rat tissues, skeletal muscle, heart, and brain contain mainly precursor forms, while mature forms dominate in spleen, lung, liver and kidney.

[0628] Prosaposin and saposins A, B, C, and D form stable complexes with 13 different gangliosides. Gangliosides of the gangliotetraose type (“a”) series) bind with high affinity, whereas (“b”) series gangliosides, 0-acetylated gangliosides, and gangliosides with shorter carbohydrate chains, bind with lower affinity. Several gangliosides (“a” series) bind to prosaposin with high affinity forming stable ganglioside-prosaposin complexes.

[0629] The derived amino acid sequence of SAP precursor is given in O'Brien J S et al, Science 241: 1098-1101 (1988). Amino acids 229 to 323 are colinear with the chemically sequenced amino acids of SAP-2. The nucleotide sequence from which the protein sequence was derived is deposited in the GenBank (access code J03086). The four SAP-like domains are aligned to emphasize the nearly identical placement of cysteine residues, glycosylation sites, and conserved proline residues.

[0630] Prosaposin cDNA has been elucidated by O'Brien J S et al., Science 241: 1098-1101 (1988). The open reading frame contains regions coding for mature SAP-1 and SAP-2 and the four SAP-like domains. Domains 1 to 4 correspond to amino acid residues 47 to 130, 182 to 262, 298 to 377, and 392 to 474, respectively. The prosaposin gene covers a region of at least 17 kb on segment q21 of chromosome 10. The positions of its 14 introns, the cysteine residues and the N-glycosylation sites show some regularities supporting the assumption that the sap-precursor gene arose by sequential duplication of an ancestral gene coding for only one sap. Exon 8 consists of only nine base pairs which code for three amino acids near the C-terminus of sap-B. In different human cDNA libraries, cDNAs are found with or without the nine bases of exon 8. After amplification by polymerase chain reaction and direct sequencing, these two forms and a third one containing only the last six bases of exon 8 are detected in cDNAs prepared from cultured human skin fibroblasts. All three forms are found in cells from a normal proband and from two patients with sap-B deficiency due to a point mutation in exon 7. The cDNA of prosaposin without the nine extra bases of exon 8 encodes a polypeptide chain of 524 amino acids starting with a typical signal peptide or amino acids for entering the ER.

[0631] The prosaposin cDNA construct is also generated by amplifying a rat testicular Zap cDNA library by PCR (polymerase chain reaction) with two synthetic oligonucleotide primers. A positive signal of 1.7 KB was isolated, subcloned into the pGEM-7Zf(+). Sequence analysis showed a near-identical nucleotide and amino acid similarity to a previous rat prosaposin cDNA.

[0632] The nucleic acids encoding Siglecs, prosaposin, saposins or other Lip-TAA binding proteins are inserted into the RNA (or DNA) replicating vector to create a pRcp-Lip-TAA binding protein. This construct is administered in vivo, e.g., intratumorally, subcutaneously or parenterally wherein it produces the Lip-TAA binding protein which binds to Lip-TAAs produced or shed by tumor cells and prevents them from exerting their immunosuppressive effects on host T cell and antigen presenting cell function.

[0633] Saposins

[0634] Saposins are a family of four small glycoproteins, all of which are derived from prosaposin, and are involved in the lysosomal hydrolysis of various sphingolipids. They are water soluble and highly hydrophobic. Saposin B binds to complex gangliosides (such as G_{M1} and G_{D1a}) and transports them from donor to acceptor liposomes. Prosaposin and all the saposins bind gangliosides, sulfatides, and cerebrosides to varying degrees and facilitate glycolipid insertion into erythrocyte ghosts or brain microsomes to differing extents. Also, the sulfatide activator protein (SAP A) markedly accelerates the transfer of complex gangliosides compared with simpler glycolipids having shorter carbohydrate chains.

[0635] The amounts of ganglioside bound in vivo depends on many factors, including the state of the ganglioside (micellar or membrane bound), the type of ganglioside, the pH of binding, the presence of divalent cations, other lipids, and other binding proteins. The highest affinity of prosaposin (and saposins A, B, C, and D) is for the “a” series gangliotetraose-type gangliosides possessing terminal sialic acid residues. Ganglioside G_{Q1b} has a unique potency to enhance neuroblastoma cell proliferation and to increase the number and total length of neurites (neuritogenesis) in vitro. This ganglioside is bound tightly by prosaposin.

[0636] Although one SAP, i.e., G_{M2} activator protein, has been shown to display in vitro glycolipid transfer activity, this SAP is clearly selective for ganglioside G_{M2} Other SAPs (four of five) are encoded by a single gene and enter the lysosome as a single 65-73-kDa precursor chain that is processed into four similarly sized (˜13 kDa), fairly homologous polypeptides (SAPs A-D) that are heavily glycosylated and have acidic pI values.

[0637] Homologies among the saposins range between 16% (saposin B/saposin C) and 39% (saposin A/saposin C) with 15 amino acids being conserved in all four proteins, among them all six cysteine residues and an N-glycosylation signal. When placement of amino acids with similar properties at the same position in each sequence is considered, the similarity among saposins increases to between 47% (saposin B/saposin C) and 60% (saposin A/saposin C).

[0638] Models of each saposin indicate a compact rigidly cross-linked disulfide-bridged polypeptide containing a common hydrophobic pocket, suggesting that they should all act as lipid binding proteins.

[0639] cDNAs encoding for SAP-1 and SAP-2 have been isolated (O'Brian J S et al., Science 241: 1098-1101 (1988)). The nucleotide sequence of the largest cDNA is colinear with the derived amino acid sequence of SAP-2 and with the nucleotide sequence of the cDNA coding for the 70-kilodalton prosaposin (prosaposin cDNA). The coding sequence for mature SAP-2 is located 3′ to that coding for SAP-1 in the prosaposin cDNA. Both SAP-1 and SAP-2 are derived by proteolytic processing from a common precursor that is coded by a genetic locus on human chromosome 10. Two other domains similar to SAP-1 and SAP-2 are also identified in prosaposin. Each of the four domains is approximately 80 amino acid residues long, has nearly identical placement of cysteine residues, potential glycosylation sites, and proline residues. Each domain also contains internal amino acid sequences capable of forming amphipathic helices separated by helix breakers to give a cylindrical hydrophobic domain that is stabilized by disulfide bridges. Protein immunoblotting experiments indicate that prosaposin (70 kilodaltons) as well as immunoreactive SAP-like proteins of intermediate sizes (65, 50, and 311 kilodaltons) are present in most human tissues.

[0640] Glycolipid Transfer Protein

[0641] Glycolipid transfer protein (GLTP), a nonglycosylated, cytoplasmic protein is present in most animal cells, and is a cytoplasmic protein. The purified protein has a molecular weight near 23 kDA and has an isoelectric point near 9.0. It contains 209 amino acids residues a high level of amino acids with non-polar side chains (48%). Northern blot analysis of shows a single transcript of 2.2 kilobases and the following hierarchy of RNA levels: cerebrum>kidney>spleen congruent with lung congruent with cerebellum>liver>heart muscle. The amino acid sequence of a glycolipid transfer protein from pig brain has been determined by automatic sequencing and fast atom bombardment mass spectroscopic analysis of peptides produced by chemical and enzymatic cleavage reactions. The protein consists of 208 residues, with N-acetylalanine as the N-terminal residue and valine as the C-terminal residue. It contains 3 cysteine residues. The primary structure of the glycolipid transfer protein from pig brain is as follows:

| | | |
|---|---|---|
| Acetyl- | A-L-L-A-E-H-L-L-K-P-L-P-A-D-K-Q-I-E-T-G-P-F-L-E-A-V-S-H-L-P | 30 |
| | P-F-F-D-C-L-G-S-P-V-F-T-P-I-K-A-D-I-S-G-N-I-T-K-I-K-A-V-Y-D | 60 |
| | T-N-P-A-K-F-R-T-L-Q-N-I-L-E-V-E-K-E-M-Y-G-A-E-W-P-K-V-G-A-T | 90 |
| | L-A-L-M-W-L-K-R-G-L-R-F-I-Q-V-F-L-Q-S-I-C-D-G-E-R-D-E-N-H-P | 120 |
| | N-L-I-R-V-N-A-T=K-A-Y-E-M-A-L-K-K-Y-H-G-W-I-V=Q-K-I-F-Q-A-A | 150 |
| | L-Y-A-A-P-Y-K-S-D-F-L-K-A-L-S-K-G-Q-N-V-T-E-E-E-C-L-E-K-V-R | 180 |
| | L-F-L-V-N-Y-T-A-T-I-D-V-I-Y-E-M-Y-T-K-M-N-A-E-L-N-Y-K-V-OH | 208 |

[0642] The purified GLTP is a mixture of two forms of a protein; one of them (about 15%) with an intramolecular disulfide bond, and a reduced form (about 800) without one. GLTP with an intramolecular disulfide bond has twice as much activity as the reduced form, and formed more GLTP-glycolipid complex. GLTP is distinctly different from other soluble proteins that interact with glycolipids such as other types lipid transfer proteins, and lectins with mannose recognition/binding domains.

[0643] GLTP is specific for neutral glycosphingolipids and gangliosides but not phospholipids or neutral lipid intermembrane transfers. The protein transfers, by a carrier mechanism, glycolipids with a β-glucosyl or β-galactosyl residue directly linked to either ceramide or diacylglycerol hydrophobic backbone. It has been shown that GLTP facilitates the transfer of glycolipids only when both the donor and acceptor membranes are in the liquid-crystalline state. The GLTP-glycolipid complex is formed as a result of removal of a glycolipid molecule from a membrane and binding to a GLTP molecule. GLTP from pig brain facilitates the transfer of glycosphingolipids which include glucosylceramide, galactosylceramide, lactosylceramide, sulfatide. lactosylceramide-II-sulfate, globotriaosylceramide, globotetraosylceramide, globopentaosylceramide, sialosyllactosylceramide, and GM₁ ganglioside. The transfer of Manβ1-4Glcβ1-ceramide and Manα1-4Manβ1-4Glcβ1-ceramide is also facilitated by GLTP from pig brain. In addition to glycosphingolipids, GLTP from pig brain also facilitates the transfer of 3-[Galβ1]-sn-1,2-diacylglycerol, 3-[Galα 1-6Galβ1]-sn-1,2-diacylglycerol, and 3-[Glcβ1]-rac-1-2-dipalmitylglycerol. The protein does not facilitate the transfer of 3-[Manα1-3Manα1]-sn-1,2-diacylglycerol, 3-[Glcα1]-sn-1,2-diacylglycerol, phosphatidylcholine, phosphatidylinositol, phosphatidylethanolamine, cholesterol, or cholesteryl oleate. GLTP from pig brain stimulates the transfer of pyrene-labeled sphingomyelin to a very small but significant extent. GLTP recognizes and binds the sugar residue directly linked to either ceramide or diacyglycerol in addition to the nonpolar portion of glycolipids.

[0644] The cloned bovine and porcine brain cDNAs for GLTP contain 627-bp open reading frames. The encoded amino acid sequences in the full-length bovine and porcine cDNAs are identical, consisting of 209 amino acid residues, Expression of GLTP-cDNA in Escherichia coli using pGEX-6P-1 vector results in glutathione S-transferase-GST-GLTP fusion protein with 50% of expressed fusion protein being soluble and active. Proteolytic cleavage of GSTGLTP fusion protein (bound to GST-Sepharose) and affinity purification resulted in fully active GLTP. Northern blot analyses of bovine tissues showed a single transcript of ˜2.2 kilobases and the following hierarchy of mRNA levels: cerebrum>kidney>spleen, lung, cerebellum>liver>heart muscle.

[0645] Non-Specific Lipid Transfer Proteins (nsLTPs)

[0646] Nonspecific lipid transfer proteins (nsLTPs) are present in both animals and plants and represent a group soluble proteins that catalyze the in vitro transfer of a wide range of lipids, including glycolipids. Although able to transfer different neutral glycosphingolipids and ganglioside G_{M1} between membranes, nsLTPs clearly differ from GLTP with regard to lipid selectivity and ability to actively transfer all common phosphoglycerides as well as cholesterol. Also, despite having basic isoelectric points (pI 8.6-9.6) like GLTP (pI 9.0), nsLTPs are much smaller (13.2 kDa) than GLTP (23.9 kDa) and are initially encoded in precursor form (15.3 kDa; pre-nsLTP). A tripeptide targeting sequence (Ala-Lys-Leu) in the C-terminal end directs certain nsLTPs to peroxisomes, where a 20-amino acid presequence is cleaved. No known organelle targeting sequences appear in the primary sequence of GLTP, which is consistent with its putative cytoplasmic localization. Given the differences in selectivity and structure along with the lack of sequence homology revealed by searches on-line data bases, available evidence indicates that GLTP is distinctly different from known nsLTPs and other lipid transfer proteins.

[0647] A non-specific transfer protein isolated from beef liver accelerates the exchange and net transfer of phospholipids and cholesterol between natural and artificial membranes (Crain R C et al., Biochemistry 19:1433-1439 (1980)). The bovine liver protein transfers phosphatidylcholine, phosphatidylethanolamine, phosphatidylinositol, sphingomyelin, phosphatidic acid, phosphatidylserine, phosphatidylglycerol, and cholesterol and also promotes net transfer of phospholipids from multilamellar vesicles to human high density lipoproteins or from small unilamellar vesicles to mitoplasts. This protein also accelerates the net transfer of cholesterol from small unilamellar vesicles to multilamellar vesicles.

[0648] Bloj et al., J. Biol. Chem. 256:5988-5991 (1981) demonstrated that this protein also accelerates the transfer of labeled glycosphingolipids between membranes. The protein shows little specificity toward the polar head of complex lipids and is known to transfer the sphingophospholipid, sphingomyelin. Di-palmitoylphosphatidylcholine is transferred 2.6 times faster than globotetraglycosylceramide from egg phosphatidylcholine vesicles to erythrocyte ghosts. Crain et al., Biochemistry 19:1433-1439 (1980)) noted that phosphatidylcholine transfer was 3 times faster than that of sphingomyelin. Glycerophospholipids are better substrates than sphingolipids for the lipid transfer protein. The nonspecific lipid transfer protein is the first protein shown to move complex neutral glycosphingolipids and gangliosides between membranes. In vivo such proteins serve to facilitate the transfer of glycolipids from their sites of initial synthesis to other sites where glycosylation may take place or where the glycolipids express their biological functions.

[0649] Additional Ganglioside Binding Proteins

[0650] Ganglioside binding proteins especially in brain or cultured neuronal cell lines are membrane-associated and specifically bind gangliosides of the “b” series with high affinity. This protein is localized to myelin membrane preparations; it differs from prosaposin in both specificity and localization. In cultured cerebral granular cells several membrane proteins bind photoreactive ganglioside G_{M1} derivative. Two prominent proteins so-labeled are released by trypsin and their molecular masses (46 and 31 kDa) are similar to the initial products of proteolysis of prosaposin. However, additional binding proteins varying from 12 to 112 kDa are also present and other ganglioside binding proteins that have basic isoelectric points.

[0651] Two glycolipid transfer proteins isolated from calf brain catalyze the transfer of gangliosides and neutral glycosphingolipids from phosphatidylcholine vesicles to erythrocyte ghosts (Gammon C M et al., Biochemistry 26: 6239-6243 (1987)). Purification by differential centrifugation, ammonium sulfate precipitation, and gel filtration and fast protein liquid chromatography (Mono S), produced two peaks of activity. The major band of both fractions with a molecular mass of approximately 20,000 daltons catalyzed the transfer of ganglioside GM 1 as well as asialo-G_{M1}, but transfer protein I (TPI) is more effective with di- and trisialogangliosides. Transfer protein II (TPII)is more specific for neutral glycolipids in that G_{A1} is transferred more rapidly than any of the gangliosides; however, lactosylceramide transfer is relatively slow. Neither protein catalyzed transfer of phosphatidylcholine.

[0652] The specific transfer activity toward additional glycolipid substrates. revealed TPI to be more reactive toward G_{M1} than G_{A1}, its asialo derivative. The other gangliosides are only slightly less reactive while Lac-Cer is the least effective substrate. A different order of reactivity is seen for TP II: G_{A1} was transferred somewhat more efficiently than GM1, and the other gangliosides are transferred at considerably lower rates. Neither protein catalyzes the transfer of phosphatidylcholine. TPI, with an apparent preference for gangliosides over neutral glycolipids of shorter chain is a different protein from GLTP. The fact that neither this transfer proteins nor GLTP catalyzed transfer of phospholipids indicates a basic difference from the transfer protein of bovine liver described by Bloj et al., J. Biol. Chem. 256:5988-5991 (1981).

[0653] The activator protein which promotes hexosaminidase A catalyzed hydrolysis of G_{M2} and G_{A2} also functions as a ganglioside transfer protein in the absence of enzyme (Conzelmann W et al., Eur. J. Biochem. 123:455-464 (1982)). The activator protein extracts glycolipid monomers from micelles or liposomes to give water-soluble-complexes with a stoichiometry of 1 mol of glycolipid/mol of activator protein. In the absence of enzyme the activator acts in vitro as glycolipid transfer protein, transporting glycolipids from donor to acceptor membranes. The activator protein is specific for ganglioside G_{M2}. Other glycolipids (G_{M3}. G_{M1}. G_{D1a} and G_{A2}) form less stable complexes with the activator and are transferred at a slower rate (except for ganglioside G_{M1}) than ganglioside G_{M2}.

[0654] In the present invention, Lip-TAAs receptors on T cells, α/β+ or αβ--T cells, γ/δT cells, NKT cells, NK cells and/or antigen presenting cells of any type and dendritic cell used individually or collectively in any combination are inhibited deleted or mutated (to functionally deactivate them) in vivo using antisense techniques given in Examples 51, 52 or preferentially RNA interference as given in Examples 18-20, 74. These receptors are tested in vivo in animal models as given in Examples 18-20, 51, 52, 57-59, 74. Ex vivo deletion, inhibition, mutation of LipTAAs receptors on immunocytes or accessory cells is effected by antisense or gene knockout, ribozyme knockout techniques (Examples, 51, 57-60) or preferentially RNA interference (Examples 18-20, 74). These cells with deleted or inactivated LipTAAs receptors are incubated with Lip-TAAs ex vivo for 24 hours. They are also effective without specific ex vivo antigen stimulation assuming that they will encounter the specific Lip-TAA in vivo. They are useful in conventional models of tumor outgrowth and established tumors as welll as adoptive immunotherapy protocols given in Examples 18-20, 57-59, 68. Prior to the adoptive transfer of IR_{TAA} depleted and activated immunocytes or APCs (1-4 hours is preferred but 24-72 hours is acceptable), tumor bearing hosts are treated with decoy LipTAA receptor polypeptides to prevent circulating LipTAAs associated with serum lipoproteins from tolerizing the infused immunocytes or accessory cells (Examples 57-59).

[0655] In another embodiment, purified LipTAAs receptor or transfer protein genes are used to prepare purified LipTAAs receptor or transfer polypeptides. These structures are useful as intact polypeptides, fragments or chimeric (e.g., fused to Fc fragment) proteins with conserved Lip-TAA binding domains. These purified receptors, fragments or chimeras are useful as decoys in vivo to bind Lip-TAAs in vivo thus preventing them from exerting their immunosuppressive effects on immunocytes and accessory cells. They are prepared in soluble form or they are incorporated into phage displays or liposomes and used in vivo in tumor systems given in Examples 57-59.

[0656] Similarly, the present invention contemplates the reduction/deletion of immunosuppressive ganglioside production/secretion in ganglioside-producing tumor cells such as neuroblastoma-tumor cells. Production of mono-, di- and tri-sialo gangliosides G_{M1} G_{M2}, G_{M3}, G_{D1a,} G_{D1b}, G_{D3}, GT₁ₐ, G_{T1b} production is inhibited by introduction of silencing, inhibitory siRNA specific for sequences encoding ganglioside glucosyltransferases, ganglioside galactosyltransferases or ganglioside sialyltrasferases in tumor cells (Example 74). Other ganglioside transferases active in the synthesis of authentic or incomplete gangliosides with substantially the same function as the native gangliosides may also be targeted by siRNAs. Human or mouse neuroblastoma cell lines, e.g., human SK—N-BE and murine Neuro-2a NB cells are used to induce tumors in SCID mice. Transfection of siRNA specifie for the coding regions of ganglioside glucosyltranferases, ganglioside galactosyl transferases or ganglioside sialyltrasferases in tumor cells is accomplished ex vivo prior to tumor cell. implantation as given in Examples 1 and 74. The outgrowth of tumors is monitored in the siRNA transfected and mock transfected tumor groups. Tumor outgrowth is minimal in the mice injected with tumor cells transfected with the siRNA whereas mock transfected tumor cells grow rapidly and kill the mice within 28 days of implantation. In this way, the powerful immunosupressive effects of tumor gangliosides on T cells and antigen presenting cells is minimized or eliminated.

### 57. Deletion of Nucleic Acids Encoding Src-Like Adapter Protein (SLAP) SLAP Protein

[0657] The Src-like adaptor protein (SLAP) contains Src homology (SH)3 and SH2 domains, which are highly homologous to those of Lck and other Src family members. Like Lck. this Src-like adaptor protein (SLAP) contains a short unique NH,-terminal domain, followed by SH3 and SH2 domains. However, it does not contain a tyrosine kinase domain. Instead of a kinase domain. SLAP contains a unique COOH terminus of 104 residues. Both the SH3 and SH2 domains of SLAP are highly homologous to those of Lck and share with them 55 and 50% identity, compared with 42 and 43% with c-Src, respectively A structure-function analysis revealed that both the SH3 and SH2 domains contribute to this inhibitory function. SLAP was cloned using a yeast two-hybrid screen (21).

[0658] SLAP is expressed in T cells. When expressed in Jurkat T cells it can specifically inhibit TCR signaling leading to nuclear factor of activated T cells (NEAT)-, activator protein I (AP-1)-, and interleukin 2-dependent transcription. The SH3 and SH2 domains of SLAP are required for maximal attenuation of TCR signaling. SLAP acts proximally in the TCR signaling pathway. In stimulated Jurkat cells, SLAP associates with a molecular signaling complex containing CD3ζ, ZAP-70, SH2 domain-containing leukocyte protein of 76 kD (SLP-76), Vav, and possibly linker for activation of T cells (LAT). Collectively, these results suggest that SLAP interacts with the stimulated TCR complex to downregulate TCR-mediated signals by interfering with the proximal signaling events. Therefore, the differential expression of SLAP protein in T cells regulates sensitivity to TCR stimulation, thus influencing mature T cell responses to antigenic stimulation.

[0659] The present invention contemplates the deletion of inhibitory adaptor proteins such as SLAP from T cells in tumor bearing hosts using antisense techniques in vivo as given in Example 51. Alternatively, SLAP deletion can be achieved ex vivo in a population of T cells including γ/δ T cells, α/β T cells using gene knockout or antisense techniques as given in Examples 51-52. These T cells are harvested and used for the adoptive immunotherapy of cancer as given in Examples 15, 16, 21, 23, 68.

### 58. Superantigen Conjugated to Thrombospondin I and Type 1 Repeat Peptides of Thrombospondin and Other Molecules Inducing Apoptosis of Endothelial Cells

[0660] In the present invention, superantigens are conjugated to molecules which induce apoptosis of endothelial cells. Superantigens are known to induce tissue inflammation and in the absence of effector cells or their mediators are capable of inducing endothelial cell injury. They are conjugated to thrombospondin 1 and type 1 repeat peptides of thrombospondin which also induce apoptosis of tumor neovascular endothelial cells. The native sequence KRFKQDGGWSHWSPWSSC or the modified sequence which lacks the TGF, activating sequence KRAKAAGGWSHWSPWSSC equally stimulated DNA fragmentation. The basic residues and the WSXW motif are both required for optimal activity. The thrombospondin and/or the superantigen in the conjugate may be used in nucleic acid form. The superantigen polypeptide or nucleic acid in the conjugate is capable of evoking an inflammatory response in the tumor microvasculature while the thrombospondin induces apoptosis of tumor endothelial cells. Conjugations of polypeptides and/or nucleic acids are carried out by methods given in Example 4 and 5. The conjugates are prepared by chemical crosslinking using homo or heterobifunctional crosslinking agents, carbodiimide, cyanoborohydride or glutaraldehyde as given in Hermanson G. Bioconjugate Technology Academic Press, New York, N.Y. (1996). They are also prepared as fusion proteins or phage displays according to protocols given in Examples 5 and 6. They are also useful in nucleic acid form as a chimeric SAg-thrombospondin nucleic acid construct since the CD36 gene has been cloned (Wyler B et al., Thromb. Hemost. 70: 5001505 (1993); Armsella A L et al., J. Biol. Chem. 269: 18985-18991 (1994). The conjugates are useful as a preventative or therapeutic anti-tumor vaccine according to Examples 15, 16, 18-23. They are also used ex vivo to produce tumor specific effector cells for adoptive immunotherapy of cancer (Examples 2-5, 7, 15, 16, 18-23).

### 59. Removal of SE-Specific Antibodies with Anti-Idiotype Antibodies

[0661] It is well established that naturally occurring antibodies specific for SEs are present in a large percentage of human patients. During clinical trials using a fusion protein of SEA conjugated to a tumor specific antibody, antibodies specific for SEA appeared in the serum. The titer of these antibodies often rose with treatment and their appearance correlated with increased toxicity. These antibodies also interfere with the ability of the SE conjugates to induce tumoricidal effects by binding to the T cell activating epitopes of SE in the conjugates precluding the conjugate from stimulating a tumoricidal T cell response. The antibody-bound SE conjugates as large immune complexes are also readily taken up by reticuloendothelial cells and therefore diverted from targeting the tumor.

[0662] To solve this problem, antibodies specific for the idiotypic region-of anti-SE antibodies are prepared by methods given in Example 57. The anti-idiotype is preferably of the Ab2β reticuloendothelial cells which is an internal image anti-idiotype and has the capacity to mimic the antigen used to generate the SE-specific antibody. The Ab2γ antibody recognizes an Id within the antigen binding site, a characteristic similar to Ab2β but fails to exhibit biological mimicry of the antigen. This particular subset of anti-idiotype antibodies would be the most desirable in the present case as it would not further activate the host anti-SE response, however the others could be useful as well. The anti-Ids could also be prepared in hybridoma or genetic form and used in vivo (via transfection of autologous antibody producing cells or implantable chambers) to provide a continuous amount of anti-id for the duration of use of the SE-conjugates).

[0663] The anti-Ids are prepared and administered as less immunogenic Fab, F(ab)′₂, or Fv fragments and humanized to avoid alloimmunization. In the case of SEB, the dominant B cell epitope is the C-terminal region (aa 225-234) which may be used to isolate the major SE specific antibodies. Anti-SE idiotypic antibodies are detected and characterized as given in Example 57. The amount of anti-idiotype antibody administered is sufficient to neutralize all the circulating SE specific antibodies. Doses would range from 100 ng to 1000 mg and could be predicted based on in vitro neutralization tests determining the amount of antibody required to bind all of the antigen in a small volume of serum. When the level of these antibodies is undetectable, the SE-tumor specific antibody conjugate is administered in doses effective to kill the tumor. This could range from 2-15 ng/kg-100 ug/kg of SE in the conjugate. Devoid of SE specific antibodies to neutralize T cell activating activity and divert the SE conjugate from the tumor site, the SE conjugate is able to target the tumor in vivo and initiate a tumoricidal response. The preferred route of injection is intravenous but other parenteral routes such as intraperitoneal, intrathecal and intratumoral may be useful as well. The preferred method of administration is via infusion although injection, sustained release formulations and microinfusion or osmotic pumps may also be useful.

[0664] Epitopes that Saturate MHC Class II and Neutralize SE Antibody Binding.

[0665] The present invention contemplates the use of superantigen peptide or nucleotide epitopes recognized by superantigen specific antibodies in the circulation of cancer patients which neutralize the therapeutic effect of superantigen specific antibodies. Following neutralization, therapeutic superantigen-tumor specific ligand conjugates are administered which target the tumor and express their tumoricidal effects in vivo. A dominant epitope on SEB recognized by anti-SEB antibodies is the sequence 225-234 (Nishi et al., J. Immunol. 158: 247-254 (1997) and an epitope on SEA recognized by anti-SEA antibodies is the sequence 121-149 (Hobieka et al., Biochem. Biophys. Res. Comm. 223: 565-571 (1996).

[0666] A preferred epitope to neutralize SE-specific antibodies also has marginal superantigen properties compared to the native agent as shown by their inability to induce proliferation of T cells via Vβ and express mRNA encoding TH1 cytokines IL-2, and IFNγ. An example of an SEB mutant with minimal T cell proliferative activity and cytokine activation has a single residue change from the wild type around a conserved leucine (L45). These mutants are designated Q43P, F44P or L45R (Woody M A et al., J. Infect. Dis. 177:1013-1022 (1998). An anti-idiotype peptide or whole antibody, F(ab′)₂ or Fv, specific for the variable region of the SE antibody is also useful in saturating the antigen binding region of the SE antibody. The latter peptide is prepared as a monomer, dimer or polymer or attached to a carrier conjugates.

[0667] A second peptide or antibody (including F(ab′)₂ or Fv) specific for the alpha1 subunit of the DR class II molecules (the MHC class II binding site for SEB) blocks SEB binding to its non-polymorphic MHC class II receptor and inhibits class II-TCR interactions. This blocking construct saturates MHC class II binding sites so that when therapeutic SAg-tumor specific ligand conjugates are administered, they are not diverted to MHC class II receptors. Further, the blocking construct does not interfere with the T cell activating function of the therapeutic SAg-mAb drug because the latter binds to tumor via its tumor specific antibodies and activates the T cell TCR via a non-MHC class II dependent mechanism.

[0668] The SE antibody neutralizing agent (either the SE antibody neutralizing peptide or anti-idiotype antibody) and MHC class II blocking agent (either inactive SE or anti-DR alpha 1antibody or inert SE peptide) are administered one hour before the administration of the SE-monoclonal antibody therapeutic conjugate. The amount of epitope or anti-idiotype antibody required to neutralize the anti-SE antibody is determined by measuring the amount of SE antibody present in the serum of the subject. A therapeutic dose is selected that neutralizes all of the anti-SE binding activity in the serum. The MHC class II binding peptide or anti-MHC class II alpha1 domain antibody is administered in amounts sufficient to saturate all the MHC class II alpha I domain receptors. One hour after administration of the two blocking constructs, the therapeutic SAg-mAb conjugate is used to localize and target tumor in vivo. Preferentially, the tumor specific antibody or receptor ligand in the conjugate has a greater affinity for the tumor than the SAg in the conjugate has for the class II molecule thus preventing the SAg from binding all MHC class II receptors and favoring binding of the conjugate to the tumor.

[0669] To reduce affinity of the SE or SPE-mAb conjugate for endogenous MHC class II binding sites, the high affinity Zn⁺⁺-dependent MHC class II binding sites in SEA, SEC2, SEC3, SED, SPEA, SPEC, SPEG, SPEH, SMEZ, SMEZ2, Mycoplasma arthritides are deleted or replaced by inert sequence(s) or amino acid(s). These structural alterations in SE or SPEA reduce the affinity for MHC class II receptors from a K_{d} of 10⁻⁷ or 10⁻⁸ to 10⁻⁵. In the case of SEB and SSA and other SEs or SPEs which have multiple low affinity MHC class II binding sites (K_{d} 10⁻⁵-10⁻⁷), alteration of the MHC class II binding sites is not necessary to further reduce affinity for MHC class II receptors; at the very least only one or two of these sites near the N terminus of the molecule may require structural deletion of substation.

[0670] To further reduce affinity of the SE or SPE-mAb conjugate for endogenous (and sometimes preexisting) SE specific antibodies, the SE dominant epitope on the SE molecule in the conjugate is either removed or replaced by an inert sequence. For example, the dominant B cell epitope in SEB, amino acids 225-234 is replaced by sequence 209-212 from SPEA.

[0671] Tumor specific antibodies, Fab, F(ab)′2 or single chain Fab or Fv fragments conjugated to SE or SPE in the SE or SPEA-mAb conjugate are used which have a higher affinity for tumor antigens (K_{d} 10⁻¹¹-10⁻¹⁴ or lower) than the SE or SPE class II binding sites and SE epitopes (dominant or primary, secondary or tertiary etc.) in the conjugate have for endogenous MHC class II receptors (K_{d} 10⁻⁵ to 10⁻⁷) and circulating SE antibodies (K_{d} 10⁻⁷ to 10⁻¹¹) respectively.

[0672] To further enhance the affinity of the tumor specific antibody in the conjugate for tumor cells in vivo, the tumor specific antibodies are used which are specific for more than one antigenic structures on the tumor, tumor stroma or tumor vasculature or any combination thereof. The tumor specific antibody or Fab′2, Fab or single chain Fv fragments are mono or divalent like IgG, polyvalent for maximal affinity like IgM or chimeric with multiple tumor (tumor stroma or tumor vasculature) specificities. Thus, when the SE or SPE-mAb conjugate is administered in vivo, it will preferentially bind to tumor cells rather than to endogenous SE antibodies or MHC class II receptors.

[0673] The SE-mAb or SE-monoclonal Fab/Fv conjugates described above are administered parenterally, intratumorally, intrathecally, intraperitoneally, intrapleurally by infusion or injection in conventional or sustained release vehicles as given in Section 66 in dosages of 0.01 ng/kg to 100 μg/kg using protocols given in Examples 5, 7, 14, 15, 16, 18-23, 38.

### 60. New Streptococcal Pyrogenic Exotoxins, Staphylococcal Enterotoxins and SETs for Tumor Therapy

[0674] Streptococcal pyrogenic exotoxins SPEA, SPEB, SPEC, SPEG, SPEH, SPEH SME-Z, SME-Z₂ and SSA are superantigens induce tumoricidal effects. SPEG, SPEH, and SPEJ genes were identified from the Streptococcus pyogenes M1 genomic database at the University of Oklahoma. A fourth novel gene (smez-2) was isolated from the S. pyogenes strain 2035, based on sequence homology to the streptococcal mitogenic exotoxin z (smez) gene. SMEZ-2, SPE-G, and SPE-J are most closely related to SMEZ and streptococcal pyrogenic exotoxin (SPE)-C, whereas SPE-H is most similar to the staphylococcal toxins than to any other streptococcal toxin. Recombinant (r)SMEZ, rSMEZ-2, rSPE-G, and rSPE-H were mitogenic for human peripheral blood lymphocytes. SMEZ-2 is the most potent superantigen (SAg) discovered thus far. All toxins, except rSPE-G, were active on murine T cells, but with reduced potency. Binding to a human B-lymphoblastoid line was shown to be zinc dependent with high binding affinity of 15-65 nM. Evidence from modeled protein structures and competitive binding experiments suggest that high affinity binding of each toxin is to the major histocompatibility complex class II β chain. Competition for binding between toxins was varied and revealed overlapping but discrete binding to subsets of class II molecules in the hierarchical order (SMEZ, SPE-C)>SMEZ-2>SPE-H>SPE-G. The most common targets for these SAgs were human Vβ2.1- and Vβ4-expressing T cells.

[0675] There are four naturally occurring SPEA alleles, and three of these, SPEA1, SPEA2, and SPEA3, encode toxins differing by a single amino acid. The toxin encoded by SPEA4 is 9% divergent from the other three, with 26 amino acid changes. Twenty mutant forms of SPEA1 (SPEA encoded by allele 1), and the mutant toxins were analyzed for mitogenic stimulation of human peripheral blood mononuclear cells, affinity for class II major histocompatibility complex molecules (DQ), and disulfide bond formation. Residues necessary for each of these functions were Identified., The product of allele 2, SPEA2, had slightly higher affinity for the class II MHC molecule compared with SPEA1 but not significantly greater mitogenic activity. SPEA3, however, was significantly increased in mitogenic activity and affinity for class II MHC compared with SPEA1. Thus, there is evidence that the toxin encoded by some of the highly virulent S. pyogenes STSS-associated isolates is a more active form of SPEA.

[0676] A new ˜28-kDa superantigen protein designated streptococcal superantigen (SSA), was isolated from culture supernatants. SSA stimulated proliferation of human T cells bearing Vβ1, Vβ3, Vβ5.2, and Vβ15 in an MHC class II-dependent manner. N-terminal sequencing found the first 24 residues of SSA to be 62.5% identical to staphylococcal superantigens SEB, SEC1, and SEC3.

[0677] Newer Staphylococcal enterotoxins SEG, SEH, SEI, SEJ, SEK, SEL, SEM, ENT, ENT1, ENT2, also show superantigenic activity and are capable of inducing tumoricidal effects. The homology of these toxins to other toxins in the family ranges from 27-64%. Selective expansion of TCR Vβ subsets has been demonstrated for each. (Jarraud S et al., J. Immunol. 166: 669-677 (2001); Jarraud S et al., J. Clin. Microbiol. 37: 2446-2449 (1999); Munson, S H et al., Infect. Immun. 66:3337-3345 (1998 The above streptococcal and newer enterotoxins retain T cell activation and VB usage. SPEA, SPEC, SPEG, SPEH, SME-Z, SME-Z₂, SEG, SEH, are known to utilize zinc as part of high affinity MHC class II receptor. Amino acid substitution(s) at the high affinity zinc dependent class II binding site is used to reduce their affinity for MHC class II receptor. Tumor localization is insured by the fusion with tumor specific antibodies, F(ab′)₂ or single chain Fv fragments. Additional or alternative tumor localizing motifs may be added to the toxin molecules which include but are not limited to an RGD motif, VEGF (localizing to KDR tyrosine kinase receptors on vascular endothelium) and other tumor receptor ligands.

[0678] These proteins and their homologues are isolated and characterized as in Example 62 and Section 64. These proteins and their homologues are useful as preventative or therapeutic antitumor vaccines according to Examples 4, 15,16, 18-23 and in nucleic acid form as in Example 31. They are administered as given in Example 14 preferably parenterally by injection or infusion. They are also useful ex vivo for producing a population of tumor specific effector cells (T cells, γ/δT cells NKT cells, NK cells) for adoptive immunotherapy of cancer (Examples 2-5, 7,14, 15, 16, 18-23, 68).

[0679] In the present invention, these agents in protein or nucleic acid form is used to treat tumors. These agents may be administered intratumorally or parenterally by injection or infusion as given in Examples 14-16, 18-23. Allelic forms, homologues or mutants of the native agents as given in section 65 are also useful in treatment. They are used to induce tumor killing as a vaccine or against established tumors under protocols given in Examples 14-16, 18-23

### 62. Staphylococcal Exotoxin Like Proteins

[0680] The Staphylococcal exotoxin-like proteins (SETs) encoded by a new group of S. aureus exotoxin genes with sequence homology to the native enterotoxins and retain the consensus sequences that are found in staphylococcal and streptococcal exotoxins and toxic shock syndrome toxin 1. These agents stimulate the production of interleukin-1β, IL-6, and TNFα by human peripheral blood mononuclear cells and induce tumoricidal responses (Williams, R J et al., Infect. Immun. 68:4407-4415 (2000)). Natural preexisting antibodies specific for these agents are not generally present in human serum.

[0681] The four complete set genes encode proteins of between 227 and 234 amino acids, which have 38 to 53% homology to each other. The partial set2 gene encodes the C-terminal 172 amino acids of this protein. An alignment of the amino acid sequences of the SET proteins is shown in FIG. 2 of Williams et al., supra. Each of the set proteins (apart from set2, for which the N-terminal region has not been sequenced) possesses putative N-terminal signal sequences, as determined using the Signal algorithm for gram-positive bacteria, indicating that these are secreted proteins. The mature extracellular proteins are predicted to consist of 201 (set1), 204 (set3), 202 (set4), and 207 (set5) amino acids. Although the similarity between the set proteins and the known staphylococcal and streptococcal exotoxins is low, being around 25%, each of the set proteins possesses the staphylococcal/streptococcal exotoxin consensus signature 2 (K—X2-[LIV]-X2-[LIV]-D-X3-R—X2-L-Xs-[LIV]-Y) as determined by searches of the PROSITE database. In addition, the set proteins have an amino acid sequence which is similar to the exotoxin consensus signature 1 (PRO-SITE, PCOC00250). set1, set2, and set5 have the greatest homology to SPEC and 25% sequence identity, respectively), while set3 and set4 are most closely related to TSST-1 (25 and 27% identity, respectively). Based on this homology, the set sequences were modeled against two target protein structures, TSST-1 (PDB file 2tss) and SPEC (PDB file Ian8). The protein models of set1 and set5 depict two domain structures joined by a central α-helix. Domain B has topology equivalent to the oligosaccharide- and oligonucleotide-binding fold (OB-fold) found in SPEC and other unrelated toxins. However, the A domain of set1 and set5 differs from that of SPEC in that it has one less β-strand in the β-grasp motif. The missing β-strand corresponds to β12 in the SPEC model and is important in zinc binding and in providing biological activity. The protein models of set5 and set4 also depict a two-domain structure joined by a central α helix (Williams et al., supra). Once again, the B domain forms a β-barrel structure. The β-grasp motif of the A domain in set3 and set4 is similar to that of TSST-1. However, the short N-terminal α-helix (aj of TSST-1 is not maintained in set3 and set4. Although there is low amino acid sequence identity between the set proteins and those of the target protein structures, these theoretical models demonstrate that the set proteins could adopt typical superantigen-type structures.

[0682] These proteins and their homologues are isolated and characterized as in Example 63 and Section 65. These proteins and their homologues are useful as preventative or therapeutic antitumor vaccines according to Examples 4, 15,16, 18-23 and in nucleic acid form as in Example 31. They are administered as given in Example 14 preferably parenterally by injection or infusion. They are also useful ex vivo for producing a population tumor specific effector cells (T cells, γ/δ T cells, NKT cells, NK cells) for adoptive immunotherapy of cancer (Examples 2-5, 7,14, 15, 16, 18-23, 68).

[0683] These agents may be administered intratumorally or parenterally by injection or infusion as given in section 14-16, 18-23. Allelic forms, homologues or mutants of the native agents as given in section 65 are also useful in treatment. They are used to induce tumor killing as a vaccine or against established tumor under protocols given in Examples 14-16, 18-23.

### 62. Streptococcal Pyrogenic Exotoxin B with RGD sites, Cysteinyl Protease (Interleukin 1β Convertase) and Metalloproteinase Activity

[0684] The structural gene for SPE B was cloned and characterized. The speB gene (1194 bp) encodes a 398-amino-acid protein. A presumed signal peptide of 26 amino acids is cleaved to result in a mature extracellular protein (zymogen) with 372 residues. Subsequently, Kapur et al. (109) used an automated DNA sequencing strategy to study speB allelic variation in 67 strains expressing 39 M protein serotypes and five provisional M serological types and representing 50 phylogenetically distinct clones identified by multilocus enzyme electrophoresis. The speB gene is well conserved and allelic variation is due solely to accumulation of point mutations. A total of 39 distinct speB alleles was identified, and based on predicted amino acid sequences, 33 of the 39 alleles would encode one of three mature protease variants that differ from one another at only one or two amino acids clustered in a 10-amino-acid region (residues 308-317) that contains a linear B-cell epitope. A total of 61 of 64 (95%) strains examined, including strains representing all 39 alleles sequenced, expressed a product that reacted with polyclonal rabbit antisera specific for purified cysteine protease. The data demonstrated that the zymogen and protease are very well conserved, and virtually all strains expressed the speB gene under the conditions assayed.

[0685] The human pathogenic bacterium Streptococcus pyogenes (group A streptococcus) produces a cysteine protease that is thought to be an important virulence factor. The protein is made as an inactive zymogen of 40,000 Da, which is converted to a 28,000-Da active form by proteolysis or auto-catalytic truncation in reducing conditions of the N-terminal 118 amino acid residues (the prosegment), to generate the mature, active protease (mSpeB) of 253 residues (27.6 kDa). The catalytic site differs from most other cysteine proteases in that it lacks the Asn residue of the Cys-His-Asn triad. The prosegment has a unique fold and inactivation mechanism that involves displacement of the catalytically essential His residue by a loop inserted into the active site. The structure also reveals the surface location of an integrin-binding Arg-Gly-Asp (RGD) motif that is a feature unique to SpeB among cysteine proteases.

[0686] Virtually all S. pyogenes strains have the structural gene (speB) and express active enzyme The zymogen or active protease is also known as streptococcal pyrogenic exotoxin B (SPE B). Sequence analysis of the 1,197-bp speB gene from 67 isolates shows that the gene is highly conserved in natural populations of S. pyogenes. The protease cleaves fibronectin (FN) and vitronectin, two abundant extracellular matrix proteins involved in maintaining host tissue integrity and also activates a 66 kilodalton human endothelial cell matrix metalloprotease. In addition, the protease cleaves human interleukin-1β precursor to generate mature interleukin-1β with full biologic activity. Purified SpeB causes a cytopathic effect on cultured human endothelial cells. Biochemical and genetic analyses have shown that both zymogen and active enzyme contain only one cysteine residue (C-192) which participates in enzyme active-site formation and catalysis.

[0687] All serotype M1 organisms, which are the most common cause of invasive disease, and some 20% of other isolates, have an RGD sequence motif at this site. RGD motifs mediate ligand binding to many integrins and the RGD-containing variant of SpeB binds to the human integrins αᵥβ₃ and α_{q1b}β₃ through this motif (Kagawa et al., Proc. Nat'l Acad. Sci. USA 97: 2235-2240 (2000)). Integrins are heterodimeric membrane proteins located on the surface of mammalian cells which are overexpressed in invasive tumors. The 3-aa sequence Arg-Gly-Asp (RGD) is critical for recognition by many integrins. SPEB as well as microbial pathogens as Borrelia burgdoferi, Yersinia spp., Bordetella pertussis, adenovirus, echovirus, foot-and-mouth disease virus, and hantaviruses bind integrins usually through an RGD motif.

[0688] In the SpeB structure, Gly-163 and Asp-164 are fully solvent-exposed. The exposure of the Asp-164 side chain is particularly significant because integrin binding is believed to occur through coordination of the Asp residue of the RGD motif to a divalent metal on the integrin receptor. The RGD motif in SpeB is located on a surface loop inserted between a short β-strand and the α-helix that leads into the C-terminal protease domain and is remote from both the active site of mSpeB and the site where the prosegment associates with the protease, implying that integrin binding through this RGD motif can occur for both the zymogen and mature protease forms of SpeB. Hence, when the protease is bound through its RGD motif, its active site should be fully exposed. Integrin binding thereby could concentrate mSpeB at the host cell surface, enhancing the efficiency of local degradation of host molecules such as fibronectin and vitronectin.

[0689] These proteins and their homologues are isolated and characterized as in Example 64 and Section 65. These proteins and their homologues are useful as preventative or therapeutic antitumor vaccines according to Examples 4, 15,16, 18-23 and in nucleic acid form as in Example 31. They are administered as given in Example 14 preferably parenterally by injection or infusion. They are also useful ex vivo for producing a population of tumor specific effector cells (T cells, γ/δT cells NKT cells, NK cells) for adoptive immunotherapy of cancer (Examples 2-5, 7,14, 15, 16, 18-23, 68).

[0690] In the present invention, SPEB in protein or nucleic acid form is used to treat tumors.

[0691] These agents may be administered intratumorally or parenterally by injection or infusion as given in section 14-16, 18-23. Allelic forms, homologues or mutants of the native agents as given in section 65 are also useful in treatment. They are used to induce tumor killing as a vaccine or against established tumors under protocols given in Examples 14-16, 18-23.

### 63. Non-Staphylococcal Enterotoxins and Streptococcal Pyrogenic Exotoxins as Tumoricidal Agents: Yersinia Species Superantigen with a Natural RGD Motif as a Tumoricidal Agent

[0692] Yersinia pseudotuberculosis has a molecular weight 14,500 and has no C—C loop. the DNA expressed in Escherichia coli DH10B. Sequencing of the YPM gene revealed that the gene contained an open reading frame of 456 base pairs encoding a precursor form of 151 amino acid residues with m.w. 16,679 that is processed into a mature form of 131 amino acid residues with m.w. 14,529. Homology analysis revealed that the homology of amino acid sequence is quite low among YPM and other well known bacterial superantigens. It is a known superantigen with the ability to bind directly to MHC class II molecules and selectively stimulate T cell populations bearing particular Vβ elements in TCR The recombinant YPM expressed by the cloned gene exerted a mitogenic activity on human PBMC at a concentration of approximately 1 pg/ml. with VB usage 3, 9, 13.1-3 in humans and in mice 7, 8.1-3. Like the native YPM, the cloned YPM required the expression of MHC class II molecules on accessory cells in the induction of IL-2 production by human T cells (Tohru M et al., J. Immunol. 154: 5228-5234 (1995); Ito, Y et al., J. Immunol. 154: 5896-5906 (1995); Uchiyama T et. al., J. Immunol. 151: 4407 (1993)). The yersinia superantigen also contains an RGD motif hence, this molecule in native form has tumor localizing capability. In addition, unlike some of the SEs or SPEs, most humans do not have preexisting antibodies to YPM.

[0693] These proteins and their homologues are isolated and characterized as in Example 65 and Section 65. These proteins and their homologues are useful as preventative or therapeutic antitumor vaccines according to Examples 4, 15,16, 18-23 and in nucleic acid form as in Example 31. They are administered as given in Example 14 preferably parenterally by injection or infusion. They are also useful ex vivo for producing a population of tumor specific effector cells (T cells, γ/δT cells, NKT cells, NK cells) for adoptive immunotherapy of cancer (Examples 2-5, 7,14, 15, 16, 18-23, 68).

[0694] These agents may be administered intratumorally or parenterally by injection or infusion as given in section 14-16, 18-23. Allelic forms, homologues or mutants of the native agents as given in section 65 are also useful in treatment. They are used to induce tumor killing as a vaccine or against established tumor under protocols given in Examples 14-16, 18-23.

### 63. Viral Vectors Expressing Antibodies or Ligands for Tumor Structures or Receptors and DNA Binding Proteins e.g., Protamine, Poly-L-Lysine Binding Superantigen DNA

[0695] To circumvent the problem of naturally occurring antibodies to SEs, the present invention contemplates the use of nucleic acids encoding the SEs which are transported to the tumor by tumor localizing motifs expressed on the construct. The superantigen nucleic acids are carried as part of a viral vector or connected to the vector by a DNA binding protein such as protamine or poly L-lysine. The present invention contemplates viral vectors such as adenoviruses which express tumor targeting motifs including but not limited to intact antibodies or fragments of antibodies in any form e.g., single chain Fv or F(ab)′2 fragments. These antibodies are preferably of high affinity for a targets on tumor cells which include but are not limited to the Erb/Neu receptor and tumor specific antigens. Vectors also carry nucleic acids encoding tumor localizing motifs which are expressed on their surface including but not limited to RGD motifs which bind to integrins αᵥβ₃ and α_{q1b}β₃ in tumors, chemokine receptors e.g., CXCR4 which bind to CXCL12.

[0696] Vectors, which themselves have natural and intrinsic RGD binding motifs including but not limited to adenovirus, echovirus, foot and mouth disease virus and Hanta virus, are used. The disease causing segment(s) of the these viruses are attenuated or deleted while their tumor localizing properties are retained.

[0697] DNA binding proteins which bind the virus to exogenous superantigen DNA include but are not limited to protamine or poly-l-lysine. Nucleic acids encoding these DNA binding proteins are integrated into the viral vector which are expressed on the viral surface. Exogenous superantigen DNA binds to the DNA binding protein (e.g., protamine or poly-l-lysine) expressed on the viral surface.

[0698] A tumor localizing motif on the vector makes contact with the tumor cell receptor or antigen wherein the superantigen DNA (as either an integral part of the virus or exogenously bound to the virus) is endocytosed. Once inside the target tumor cell, the superantigen DNA is transcribed into a functional superantigen polypeptide which is expressed in the tumor or secreted locally where it can exert its tumoricidal effects. All of the SEs, SPEs and SETs and non SE superantigens including but not limited to Yersinia pseudotuberculosis, Mycoplasma arthitides, rabies and Clostridia heat shock proteins may be used in this construct.

[0699] In an additional embodiment, nuceleic acids encoding superantigen-tumor specific antibody (Fab′)₂, Fv, Fd immunoconjugates in which the superantigen is fused to the Fc region of the tumor specific antibody or antibody fragment are transfected directly into tumor cells. The superantigens produce the immunoconjugates which can then localize to surrounding tumor and induce a tumoricidal response. Methods for production of these immunoconjugates are given in Example 66.

[0700] Small synthetic peptide, [K]₁₆RGD, is a receptor-mediated superantigen gene delivery vehicle. [K]₁₆RGD is a bifunctional linear peptide that comprises an integrin-targeting RGD component and a superantigen DNA-binding moiety consisting of 16 lysine residues. The peptide binds to cell surface integrins, forms distinct, protective complexes with superantigen DNA, and can deliver superantigen DNA to cells for transgene expression. The level of superantigen gene expression obtained is dependent on the [K]₁₆RGD-to-DNA ratio and is enhanced in the presence of the endosomal buffer chloroquine or lysosomal disrupting agents during gene delivery. Levels of reporter gene expression obtained under ideal conditions with [K]_{|6}RGD approach or even exceed those obtained with DNA delivered by Lipofectamine. See Example 66.

[0701] These proteins and nucleic acids and their homologues are isolated and characterized as in Example 66 and Section 65. These proteins and their homologues are useful as preventative or therapeutic antitumor vaccines according to Examples 4, 15,16, 18-23 and in nucleic acid form as in Example 31. They are administered as given in Example 14 preferably parenterally by injection or infusion. They are also useful ex vivo for producing a population of tumor specific effector cells (T cells, γ/δT cells, NKT cells, NK cells) for adoptive immunotherapy of cancer (Examples 2-5, 7,14, 15, 16, 18-23, 68).

[0702] In the present invention, these agents in protein or nucleic acid form are used to treat tumors. These agents may be administered intratumorally or parenterally by injection or infusion as given in section 14-16, 18-23, 66. Allelic forms, homologues or mutants of the native agents as given in section 65 are also useful in treatment. They are used to induce tumor killing as a vaccine or against established tumors under protocols given in Examples 14-16, 18-23, 66.

### 64. Functional Homologues & Derivatives of Proteins of Peptides

[0703] All of the protein and nucleic acid compositions given herein are intended to encompass functional derivatives. All of the functional derivatives of the fusion partners for superantigens described in this application are encompassed by this invention. Similarly, Staphylococcal enterotoxins or superantigens are intended to encompass functional derivatives of a particular superantigen or enterotoxin.

[0704] By “functional derivative” is meant a “fragment,” “variant,” “homologue,” “analogue,” “fusion protein,” or “chemical derivative”, which terms are defined below. A functional derivative retains at least a portion of the function of the native protein monomer which permits its utility in accordance with the present invention.

[0705] A “fragment” refers to any shorter peptide. A “variant” of refers to a molecule substantially similar to either the entire protein or a peptide fragment thereof. Variant peptides may be conveniently prepared by direct chemical synthesis of the variant peptide, using methods well-known in the art.

[0706] All or the compositions given herein or claimed as part of a new invention include the homologues of that composition. A homologue refers to a natural protein, encoded by a DNA molecule from the same or a protein. Homologues, as used herein, typically share about 50% sequence similarity at the DNA level or about 18% sequence similarity in the amino acid sequence. Homologues are more aptly quantitated in the statistical programs given below. An example a homologue of a native staphylococcal enterotoxin would be any structure including all substitution, deletion or addition mutants, derivatives, fusion proteins, chimeric proteins, fragments, conjugates, synthetic and naturally occurring structures with a Z value >10 in the Lipman-Pearson FASTA/FASTP program.

[0707] An “analogue” refers to a non-natural molecule substantially similar to either the entire molecule or a fragment thereof

[0708] A “chemical derivative” contains additional chemical moieties not normally a part of the peptide. Covalent modifications of the peptide are included within the scope of this invention. Such modifications may be introduced into the molecule by reacting targeted amino acid residues of the peptide with an organic derivatizing agent that is capable of reacting with selected side chains or terminal residues.

[0709] The recognition that the biologically active regions of the enterotoxins, for example, are substantially structurally homologous enables predicting the sequence of synthetic peptides which exhibit similar biological effects in accordance with this invention (Johnson, L. P. et al., Mol. Gen. Genet. 203:354-356 (1886).

[0710] A common method for evaluating sequence homology, and more importantly, for identifying statistically significant similarities of the proteins, peptides and nucleic acids given herein is by Monte Carlo analysis using an algorithm written by Lipman and Pearson to obtain a Z value (FASTA). According to this analysis, Z>6 indicates probable significance, and Z>10 is considered to be statistically significant (Pearson, W. R. et. al., Proc. Natl Acad Sci. USA, 85:2444-2448 (1988); Lipman, D. J. et al, Science 227:1435-1441 (1985)). Synthetic peptides corresponding to the compositions and enterotoxins and all other molecules described herein are characterized in that they are substantially homologous in amino acid sequence to an enterotoxin or other native molecule to which it is being compared with statistically significant (Z>6) sequence homology and similarity to include alignment of cysteine residues and similar hydropathy profiles.

[0711] The Lipman-Pearson FASTA program may be used to determine homology of a given protein using the BLOSUM 50 or PAM 250 scoring matrix, gap penalties of −12 and −2 and the PIR or SwissPROT database. The results are expressed as Z values or E ( ) values. For the present database (2001), the Z>13 indicates statistical significance.

[0712] Preferred Methods for Establishing Statistical Significance of Proteins or Nucleic Acids

[0713] The most widely used and preferred methodology determines the percent identity of two amino acid sequences or of two nucleic acid sequences. The sequences are aligned for optimal comparison purposes (e.g., gaps can be introduced in one or both of a first and a second amino acid or nucleic acid sequence for optimal alignment and non-homologous sequences can be disregarded for comparison purposes). In a preferred method of alignment, Cys residues are aligned. In a preferred embodiment, the length of a sequence being compared is at least 20%, preferably at least 40%, more preferably at least 50%, even more preferably at least 60%, and even more preferably at least 70%, 80%, or 90% of the length of the reference sequence. The amino acid residues (or nucleotides) at corresponding amino acid positions (or nucleotide) positions are then compared. When a position in the first sequence is occupied by the same amino acid residue (or nucleotide) as the corresponding position in the second sequence, then the molecules are identical at that position (as used herein amino acid or nucleic acid “identity” is equivalent to amino acid or nucleic acid “homology”). The percent identity between the two sequences is a function of the number of identical positions shared by the sequences, taking into account the number of gaps, and the length of each gap, which need to be introduced for optimal alignment of the two sequences.

[0714] The comparison of sequences and determination of percent identity between two sequences can be accomplished using a mathematical algorithm. In a preferred embodiment, the percent identity between two amino acid sequences is determined using the Needleman and Wunsch (J. Mol. Biol. 48:444-453 (1970) algorithm which has been incorporated into the GAP program in the GCG software package (available at http://www.gcg.com), using either a Blossom 62 matrix or a PAM250 matrix, and a gap weight of 16, 14, 12, 10, 8, 6, or 4 and a length weight of 1,2, 3, 4, 5, or 6. In yet another preferred embodiment, the percent identity between two nucleotide sequences is determined using the GAP program in the GCG software package (available at http://www.gcg.com), using a NWSgapdna.CMP matrix and a gap weight of 40, 50, 60, 70, or 80 and a length weight of 1, 2, 3, 4, 5, or 6. In another embodiment, the percent identity between two amino acid or nucleotide sequences is determined using the algorithm of E. Meyers and W. Miller (CABIOS, 4:11-17 (1989)) which has been incorporated into the ALIGN program (version 2.0), using a PAM120 weight residue table, a gap length penalty of 12 and a gap penalty of 4.

[0715] The nucleic acid and protein sequences of the present invention can further be used as a “query sequence” to perform a search against public databases, for example, to identify other family members or related sequences. Such searches can be performed using the NBLAST and XBLAST programs (version 2.0) of Altschul et al. (1990) J. Mol. Biol. 215:403-10. BLAST nucleotide searches can be performed with the NBLAST program, score=100, wordlength=12 to obtain nucleotide sequences homologous to human or murine nucleic acid molecules. BLAST protein searches can be performed with the XBLAST program, score=50, wordlength=3 to obtain amino acid sequences homologous to human or murine protein molecules of the invention. To obtain gapped alignments for comparison purposes, Gapped BLAST can be utilized as described in Altschul et al. (1997) Nucleic Acids Res. 25:3389-3402. When utilizing BLAST and Gapped BLAST programs, the default parameters of the respective programs (e.g., XBLAST and NBLAST) can be used. See http://www.ncbi.nlm.nih.gov.

[0716] Variants

[0717] One group of variants are those in which at least one amino acid residue in the peptide molecule, and preferably, only one, has been removed and a different residue inserted in its place. For a detailed description of protein chemistry and structure, see Schulz, G. E. Principles of Protein Structure Springer-Verlag, New York, 1978, and Creighton, T. E.,

[0718] Proteins: Structure and Molecular Properties, W. H. Freeman & Co., San Francisco, 1983, which are hereby incorporated by reference. The types of substitutions which may be made in the protein or peptide molecule of the present invention may be based on analysis of the frequencies of amino acid changes between a homologous protein of different species, such as those presented in Table 1-2 of Schulz et al (supra) and FIG. 3-9 of Creighton (supra). Based on such an analysis, conservative substitutions are defined herein as exchanges within one of the following five groups:

[0719] 1. Small aliphatic, nonpolar or slightly polar residues: Ala, Ser, Thr (Pro, Gly);

[0720] 2. Polar, negatively charged residues and their amides: Asp, Asn, Glu, Gln;

[0721] 3. Polar, positively charged residues: His, kg, Lys;

[0722] 4. Large aliphatic, nonpolar residues: Met, Leu, Val (Cys); and

[0723] 5. Large aromatic residues: Phe, Tyr, Trp.

[0724] The three amino acid residues in parentheses above have special roles in protein architecture. Gly is the only residue lacking any side chain and thus imparts flexibility to the chain. Pro, because of its unusual geometry, tightly constrains the chain. Cys can participate in disulfide bond formation which is important in protein folding. Tyr, because of its hydrogen bonding potential, has some kinship with Ser, Thr, etc.

[0725] Substantial changes in functional or immunological properties are made by selecting substitutions that are less conservative, such as between, rather than within, the above five groups, which will differ more significantly in their effect on maintaining (a) the structure of the peptide backbone in the area of the substitution, for example, as a sheet or helical conformation, (b) the charge or hydrophobicity of the molecule at the target site, or (c) the bulk of the side chain. Examples of such substitutions are (a) substitution of gly and/or pro by another amino acid or deletion or insertion of Gly or Pro; (b) substitution of a hydrophilic residue, e.g., Ser or Thr, for (or by) a hydrophobic residue, e.g., Leu, Phe, Val or Ala; (c) substitution of a Cys residue for (or by) any other residue; (d) substitution of a residue having an electropositive side chain, e.g., Lys, Arg or His, for (or by) a residue having an electronegative charge, e.g., Glu or Asp; or (e) substitution of a residue having a bulky side chain, e.g., Phe, for (or by) a residue not having such a side chain, e.g., Gly.

[0726] Most deletions and insertions, and substitutions according to the present invention are those which do not produce radical changes in the characteristics of the protein or peptide molecule. However, when it is difficult to predict the exact effect of the substitution, deletion, or insertion in advance of doing so, one skilled in the art will appreciate that the effect will be evaluated by routine screening assays, for example direct or competitive immunoassay or biological assay as described herein. Modifications of such proteins or peptide properties as redox or thermal stability, hydrophobicity, susceptibility to proteolytic degradation or the tendency to aggregate with carriers or into multimers are assayed by methods well known to the ordinarily skilled artisan.

[0727] In the present invention, functional derivatives or homologues of proteins, peptides, enterotoxins or other related toxins and nucleic acids including fusion proteins, mutants (deletion and addition types), variants, conjugates with other proteins including but not limited to antibodies, F(ab′)₂, Fv or Fd fragments, receptors or receptor ligands, synthetic polypeptides and nucleic acids characterized by substantial structural homology to staphylococcal enterotoxin A, enterotoxin B, enterotoxin C, enterotoxin D, enterotoxin E, enterotoxin F (TSST-1) and Streptococcal pyrogenic exotoxins A-H as well as the newer enterotoxins (SEG, SEH, SEI, SEJ, SEK, SEL, SEM), SETs 1-5 and non-enterotoxin superantigens (e.g., Yersinia pseudotuberculosis superantigen, Mycoplasma arthitidis superantigen) with statistically significant sequence homology and similarity (e.g., Z>6 in the Lipman and Pearson algorithm in Monte Carlo analysis (FASTA program) or the preferred methodology for determining sequence similarity and identity of proteins and nucleic acid as given above in this section (e.g., ALIGN, NBLAST, XBLAST programs as described above) are included in the invention. All of the superantigen conjugates to other polypeptides, peptides (e.g., verotoxins, chemokine receptors, costimulants, invasins, viral antigens) given in this application are considered to be structural homologues are included in this invention as structural homologues if they show Z values >10 or additional statistical criteria for inclusion as given in this section.

[0728] Chemical Derivatives

[0729] Covalent modifications of the monomeric or polymeric forms of protein or peptide fragments thereof, of enterotoxins or peptide fragments thereof, or both are included herein. Such modifications may be introduced into the molecule by reacting targeted amino acid residues of the protein or peptide with an organic derivatizing agent that is capable of reacting with selected side chains or terminal residues. This may be accomplished before or after polymerization.

[0730] Cysteinyl residues most commonly are reacted with a-haloacetates (and corresponding amines), such as 2-chloroacetic acid or chloroacetamide, to give carboxymethyl or carboxyamidomethyl derivatives. Cysteinyl residues also are derivatized by reaction with bromotrifluoroacetone, a-bromo-(5-imidozoyl)propionic acid, chloroacetyl phosphate, Nalkylmaleimides, 3-nitro-2-pyridyl disulfide, methyl 2-pyridyl disulfide, p-chloromercuribenzoate, 2-chloromercuri-4-nitrophenol, or chloro-7-nitrobenzo-2-oxa-1,3-diazole.

[0731] Histidyl residues are derivatized by reaction with diethylprocarbonate at pH 5.5-7.0 because this agent is relatively specific for the histidyl side chain. Para-bromophenacyl bromide also is useful; the reaction is preferably performed in 0.1 M sodium cacodylate at pH 6.0.

[0732] Lysinyl and amino terminal residues are reacted with succinic or other carboxylic acid anhydrides. Derivatization with these agents has the effect of reversing the charge of the lysinyl residues. Other suitable reagents for derivatizing a-amino-containing residues include imidoesters such as methyl picolinimidate; pyridoxal phosphate; pyridoxal; chloroborohydride; trinitrobenzenesulfonic acid; 0-methylisourea; 2,4 pentanedione; and transaminase-catalyzed reaction with glyoxylate.

[0733] Arginyl residues are modified by reaction with one or several conventional reagents, among them phenylglyoxal, 2,3-butanedione, 1,2-cyclohexanedione, and ninhydrin. Derivatization of arginine residues requires that the reaction be performed in alkaline conditions because of the high pK of the guanidine functional group. Furthermore, these reagents may react with the groups of lysine as well as the arginine epsilon-amino group.

[0734] The specific modification of tyrosyl residues per se has been studied extensively, with particular interest in introducing spectral labels into tyrosyl residues by reaction with aromatic diazonium compounds or tetranitromethane. Most commonly, N-acetylimidizol and tetranitromethane are used to form 0-acetyl tyrosyl species and 3-nitro derivatives, respectively.

[0735] Carboxyl side groups (aspartyl or glutamyl) are selectively modified by reaction with carbodiimides as noted above. Aspartyl and glutamyl residues are converted to asparaginyl and glutaminyl residues by reaction with ammonium ions.

[0736] Glutaminyl and asparaginyl residues may be deamidated to the corresponding glutamyl and aspartyl residues. Alternatively, these residues are deamidated under mildly acidic conditions. Either form of these residues falls within the scope of this invention.

[0737] Other modifications include hydroxylation of proline and lysine, phosphorylation of hydroxyl groups of seryl or threonyl residues, methylation of the a-amino groups of lysine, arginine, and histidine side chains (T. E. Creighton, Proteins: Structure and Molecule Properties, W. H. Freeman & Co., San Francisco, pp. 79-86 (1983)), acetylation of the N-terminal amine, and, in some instances, amidation of the C-terminal carboxyl groups.

[0738] Such derivatized moieties may improve the solubility, absorption, biological half life, and the like. The moieties may alternatively eliminate or attenuate any undesirable side effect of the protein and the like. Moieties capable of mediating such effects are disclosed, for example, in Remington's Pharmaceutical Sciences, 16th ed., Mack Publishing Co., Easton, Pa. (1980).

### 65. Administration of Superantigens in Controlled Release Formulations

[0739] Superantigens compositions in form of polypeptides, peptides, homologues (defined in section 65), fusion proteins, conjugates, fragments, mutants, chimeric proteins, variants and/or nucleic acids or ribonucleic acid are administered via implantable controlled release formulations and matrices. These formulations include but are not limited to poly-(D-, L- or DL-lactic acid/polyglycolide) polymer, ethylene-vinyl acetate (EVAc) which is applicable to polypeptides in general—bioerodible polyanhydrides, polyimino carbonate, sodium alginate microspheres, hydrogels, D and poly DL (lactide/glycolide) copolymers, ethylene-vinyl acetate (EVAc: Elvax 40W, Dupont) among others which are given in great detail in the foregoing patents and publications which are hereby incorporated by reference (U.S. Pat. Nos. 4,891,225, 4,942,035, 4,877,606, 4,906474, 4,806,621, 4,789,516, 4,925,677, EP 92918B1, EP No. EPO166596B1; Jeyanthi, R et al., J. Controlled Release, 13:91-98 (1990); Greig, N et al. J. Controlled Release 11:61-78 (1990); Kaitsu, I. et al., J. Controlled Release 6: 249-263 (1987); Yang, M. B. et al., Cancer Res 49:5103-5107 (1989); Eckenhoff, B et al., Biomaterials 2:89 (1981)).

[0740] Preferably the controlled release preparations are administered in close proximity or actually into a administration. However tumor at other sites may also be treated in this way.

[0741] Superantigens and SETs of any kind including but not limited to staphylococcal enterotoxins A, B, C, D, E, F, G H, I, J, K, L, M, streptococcal pyrogenic exotoxins, Y. pseudotuberculosis superantigen, M. arthitidis, C. perfringens exotoxin are prepared as in U.S. Pat. No. 6,126,945, which is hereby incorporated by reference, Examples 62-65, 71. They are also administered in native form or as biologically active fragments peptides, homologues (defined in section 65), fusion proteins, mutants, chimeric proteins, variants and/or nucleic acids or ribonucleic acids are administered parenterally and intratumorally, intrathecally, intraperitoneally, intrapleurally directly into tumor or to a site in close proximity to the tumor using conventional soluble diluents and vehicles such as normal saline as given below in this section.

[0742] Dosages of superantigens, conjugates and homologues used for administration of these compositions range from 5 ng to 500 micrograms once every 7-10 or 30 days. They may be given as a single or multiple doses. For intraperitoneal and intrapleural administration, the sustained release superantigens are generally (but not always) administered after partial or complete removal of the ascites or pleural fluid from these cavities by thoracentesis or paracentesis.

### 66. Sickled Erythrocytes as Carriers of Tumoricidal Agents

[0743] Sickled erythrocytes are known to be more adherent to microvascular endothelium than normal erythrocytes and to adhere to a greater extent under conditions of local hypoxia and acidosis. The primary pathologic defect in sickle cell disease is the abnormal tendency of hemoglobin S to polymerize under hypoxic conditions. The polymerization of deoxygenated hemoglobin S results in a distortion of the shape of the red cell and marked decrease in its deformability. These rigid cells are responsible for the vaso-occlusive phenomena which are the hallmark of the disease.

[0744] Sickle red cells adhere to the microvascular endothelium for the following reasons: Sickled cells have abnormally increased expression of α₄β₁ integrin and CD36. Activation of platelets releases thrombospondin, which act as a bridging molecule by binding to a surface molecule, CD36, on an endothelial cell and to CD36 or sulfated glycans on a sickle reticulocyte. Inflammatory cytokines induce the expression of vascular-cell adhesion molecule 1 (VCAM-1) on endothelial cells. This adhesive molecule binds directly to the α₄β₁ integrin on the sickle reticulocyte.

[0745] In the oxygenated state, the extent of sickle cell adhesion is density-class dependent: reticulocytes and young discocytes (SS1) greater than discocytes (SS2) greater than irreversible sickle cells and unsicklable dense discocytes (SS4). Hypoxemic conditions have no effect on adherence of normal erythrocytes but sickle erythrocyte adherence to endothelial cells is increased significantly. The least dense sickle erythrocytes containing CD36 and VLA-4+ expressing reticulocytes are especially involved in hypoxia sensitive adherence. Selective secondary trapping of SS4 (dense cells) occurs in post capillary venules where deformable SS cells are preferentially adherent. Vaso-occlusion is induced by a combination of precapillarly obstruction, adhesion in post capillary venules, and secondary trapping of dense erythrocytes. This induces local hypoxia leading to increased polymerization of hemoglobin S and rigidity of SS erythrocytes. In this way the obstruction is multiplied and extended to nearby vessels.

[0746] In the present invention, sickled erythrocytes are used to carry tumoricidal agents into the microvasculature of tumors. Sickle cell trait cells are preferred since they are normal under physiologic conditions but sickle and become adhesive in the acidotic and/or hypoxemic tumor microvasculature. Tumoricidal agents introduced into and carried by sickled erythrocytes include oncolytic viruses including but not limited to herpes simplex, adenoviruses, vaccinia, Newcastle Disease virus, autonomous parvoviruses, In addition, the adenovirus encoding thymidine kinase is transfected into tumor cells that are then susceptible to lysis ganciclovir. Various oncolytic and tumor specific viruses with tumor specificity used to transfect sickle cells are described in Kirn, D. et al., Nat. Med. 7:781-7 (2001).

[0747] In addition the sickled erythrocyte carry nucleic acids encoding tumoricidal agents including but not limited to C. perfringens exotoxin, pertussis toxin, verotoxins, pseudomonas exotoxins and superantigens, perforin, granzyme B, complement components (membrane attack complex), oxidized LDL, tumor specific antibodies alone or fused to toxins including but not limited to superantigens, Pseudomonas exotoxins, ricin, clostridia toxin. The nucleic acid encodes a hemolysin such as but not limited to E. coli hemolysin or staphylococcal alpha hemolysin. The sickled cell can also contain anaerobic bacterial spores such as clostridia species which can grow selectively in hypoxemic tissues. The sickled erythrocyte also carries phage displays, exosomes, sickle cell vesicles, sec vesicles expressing tumor toxins or superantigens. The toxins may be fusion proteins of toxins with ligands: expressed on tumor vasculature or tumor such a EGF, inactivated factor VIII or antibodies specific for a wide variety of tumor antigens well known in the art.

[0748] The nucleic acids encoding these toxins and oncolytic and tumor specific viruses are placed under the promoter of the heat sensitive global operator (Example 69). When entering the hypoxic tumor, sickled erythrocyte adhere to the tumor vasculature. In the hypoxemic environment of the tumor, the hypoxia sensitive global promoter is activated and induces the production lytic viruses and toxins. Sickled cells are disrupted and lyse releasing lytic virus and toxin into the hypoxic tumor. As the tumor site becomes more hypoxic, VCAM-1 and p-selectin expression on tumor endothelium are upregulated trapping more circulating sickled cells in the tumor microcirculation to undergo lysis with release of tumoricidal products into the tumor area.

[0749] The sickled cell is transfected preferably with the oncolytic viruses and toxins given above at a stage preferably before it is enucleated (Examples 1, 60, 69). Nucleated sickle reticulocytes are the preferred cell for transfection although enucleated sickled cells will also work (Example 69) Anaerobic bacterial spores such clostridia are transfected into the sickled erythrocytes by endocytosis or electroporation (Schrier S. Methods in Enzymology 149: 261-271 (1987); Tsong T Y Methods in Enzymology 149-259 (1987)). They are also introduced into sickle erythrocytes that have been lysed under hypotonic conditions and the membranes annealed with encapsulation of the anaerobic spores(Example 69).

[0750] Erythrocytes from subjects with sickle trait are preferred because these red cells are functionally and structurally normal in the circulation but are activated to sickle in the hypoxic tumor vasculature. Here they assume the sickled configuration, adhere to the endothelium of the tumor microcirculation and obstruct microvasculature in a manner similar to the homozygous SS erythrocytes.

[0751] The sickled erythrocytes are administered parenterally by injection or infusion in a therapeutically effective amount of cells. This encompasses a volume of 1-25 cc of packed cells administered i.v. over a one hour period. These cells are used in protocols given in Example 14-16, 18-23, 66.

### 67. Transfection of Tumor Cells with Superantigen and Nucleic acids Encoding the OX-40 Ligand or 4-1BB1 Ligand or Antibody (F(ab′)₂ or Fv Fragments) Specific for OX-40 Receptor or the 4-1BB1 Receptor

[0752] Two primary vaccine strategies have been used to boost T cell-specific tumor immunity in animal models as well as in human clinical trials. The first involves genetic modification of tumor cells in vitro (transfection of immune-enhancing genes) and immunization with the altered tumor cells in vivo. The second strategy involves expansion of tumor-reactive T cells either by using Abs to T cell surface markers or peptides specific for tumor antigens. Most studies conclude that the terminal effector cells responsible for T cell-specific tumor killing are CD8+ T cells. Therefore, prior strategies specifically augmented the CD8 arm of the immune system using MHC class I-specific tumor peptides. However, in certain animal tumor models that CD4+ T cells are responsible for recognition and elimination of tumors. Augmentation of tumor-specific responses to both CD4 and CD8 T cells is the most beneficial tumor vaccine strategy.

[0753] Increasing the long-term survival of memory T cells after immunization is desirable for a successful vaccine. The generation of large numbers of memory T cells in vivo is difficult because Ag-stimulated T cells are susceptible to activation-induced cell death. CD4 T cell arm of immunity is stimulated by the costimulatory receptor OX-40 (OX-40R) which is preferentially expressed by CD4+ T cells. OX40 engagement results in a 60-fold increase in the number of Ag-specific CD4+ memory T cells that persisted 60 days postimmunization. Thus, OX40 engagement early after immunization with soluble Ag enhances long-term T cell and humoral immunity in a manner distinct from that provided by blocking CTLA-4.

[0754] The presentation of a tumor Ag to T cells by MHC class I or II molecules is insufficient to prime an immune response in vivo. At least two signals are necessary to activate a CD8 or CD4 T cell response. The first signal is delivered through the T cell Ag receptor by Ag (peptide) bound to MHC class I or II. If only the first signal occurs, the T cell becomes tolerant or undergoes apoptosis. A second signal involving the ligation of a costimulatory molecule is required for optimal T cell activation. The best-characterized second signal is delivered to the T cell CD28 receptor by its ligand B7.1 or B7.2 (now known as CD80 and CD86, respectively). Both B7.1 and B7.2 bind to two determinants on T cells, CD28 and CTLA-4; the former is constitutively expressed on 95% of CD4+ and 50% of CD8+ T cells, and the latter is expressed only on activated T cells. The interaction of CD80 or CD86 with CD28 results in increased production of IL-2, which is necessary for the development of a beneficial T cell response. In contrast, the interaction of B7 with CTLA-4 delivers a negative signal to the T cell and could negate the activation signal of CD28.

[0755] The OX-40R is expressed on activated CD4+ T cells and when engaged causes a potent costimulatory signal to effector T cells that enhances long-term survival. Several other membrane-bound receptor-ligand pairs serve as costimulators for T-cell activation. In particular, members of the tumor necrosis factor receptor superfamily share the ability to enhance or costimulate the process of T-cell activation. This family consists of the CD30, CD40, CD27, Fas (CD95), DR3, 4-1BB, and OX-40. The 4-1BB receptor binds to a high-affinity ligand (4-1BBL) expressed on several APCs such as dendritic cells, macrophages, and activated B cells. Expression of 4-1BB is somewhat restricted to primed CD4, CD8 T cells, and natural killer cells. Of particular significance is that administration of 4-1BB mAb as a single agent eradicates well-established tumors in mice. Although both CD4 and CD8 participated in the antitumor immune responses, the stimulation of a CD8CTL response was particularly striking. The CTL activity generated from 4-1BB mAb-treated mice was increased up to approximately 65 times compared with that of spleen cells from control animals. Thus, ligation of costimulation receptors in vivo may augment natural immunity to the growing tumors sufficient to induce their regression.

[0756] The OX-40 receptor (OX-40R) is a transmembrane protein found on the surface of activated CD4(+) T cells. and not on normal resting peripheral blood lymphocytes. The OX-40 ligand (OX-40L) is a type II membrane protein of ˜34,000 m.w., which is expressed on activated B cells, activated endothelial cells, dendritic cells, and activated macrophages. It is not expressed on normal resting cells. The OX-40L delivers a potent costimulatory signal to OX-40R+T cells and an OX-40R/OX-40L interaction appears to be directly involved in an adhesion event between endothelial cells and T cells. When engaged by an agonist such as anti-OX-40 antibody or the OX-40 ligand (OX-40L) during antigen presentation to T cell lines, the OX-40R generates a costimulatory signal that is as potent as CD28 costimulation. Engagement of OX-40R enhances effector and memory-effector T cell function by up-regulating IL-2 production and increasing the life-span of effector T cells. The signal generated by the OX-40R inhibits activation-induced T cell death (AICD) and thereby increases the number of cells differentiating from the effector to memory T cell stage.

[0757] Previously, we showed that tumor cells transfected with superantigen SEB delivered with tumor cells transfected with the costimulant B7 and MHC class II are effective in reducing the number of lung metastases in a metastatic breast cancer model, Example 70. The present invention contemplates the transfection of tumor cells with OX-40 ligand gene (Godfrey W R et al., J. Exp. Med. 180: 757-762 (1994) or the high-affinity ligand (4-1BBL) or an Fv fragment that expresses anti-OX40R or anti-4-1BBL together with nucleic acids encoding a superantigen. The gene for OX-40 ligand has been cloned and is transfected into tumor cells as described in Examples 1 and 70. The superantigen gene is similarly transfected into the same tumor cells or alone into a equal number or the same tumor cells as given on pages 3-5 and Example. The tumor cells cotransfected with SAg and OX-40 ligand or the two populations of tumor cells transfected with superantigen and OX-40 ligand are injected into mice with known metastatic tumor as given in Example 70. The results show that the mice treated with the tumor cells transfected with superantigen and OX-40 ligand had statistically significant reduction in the number of metastases compared to mock transfected tumor cells or either superantigen or OX-40 transfected alone. The method of transfecting tumor cells with the costimulant genes and tumor models used are given in Examples 1 and 70. Similar results are obtained by cotransfecting high affinity 4-1BB1 ligand into tumor cells in place of OX-40 ligand. These transfectants used in the same tumor system also demonstrate a statistically significant reduction in the number of lung metastases in the metastatic breast cancer model as described in Example 70.

[0758] Superantigens Conjugated to OX40L or 4-1BBL and Tumor Specific Antibody, Fab or scFv Fragments

[0759] The present invention contemplates the use of the superantigens and SETs in any form including but not limited to Superantigens and SETs of any kind including but not limited to staphylococcal enterotoxins A, B, C1, C3, C3, D, E, F, G H, I, J, K, L, M, streptococcal pyrogenic exotoxins, Yersinia pseudotuberculosis superantigen, M. arthitidis superantigen, C. perfringens exotoxin A fused to a potent costimulant ligand (extracellular domain preferred) such as OX-40 ligand or 4-11B ligand. A preferred superantigen in this conjugate is one to which humans do not make or make only marginal amounts neutralizing antibody fused recombinantly or biochemically to a high affinity tumor specific antibody, Fab or single chain fv. Superantigens such as Yersinia pseudotuberculosis or clostridia perfringens toxin A to which humans do not have preexisting antibodies are preferred. One such superantigen, Yersinia pseudotuberculosis superantigen has, in addition, a natural RGD domain with tumor localizing properties. Hence, Yersinia pseudotuberculosis is one of the preferred-superantigens for use in the SE-OX-40 ligand/4-11B ligand conjugate.

[0760] SEC1, is also preferred for use in the SE-OX-40 ligand or 4-11B ligand conjugate. The latter superantigen has the highest affinity for TCR Vβ regions of all superantigens. This TCR binding may be strengthened in SEC mutants by amino acid substitutions in the Vβ binding areas of the molecule that will increase its TCR binding. Similarly, mutations in SEC MHC class II binding sequences may totally eliminate SEC binding to MHC without interfering with its TCR binding, and activating function.

[0761] Another preferred superantigen for the SE-OX-40 ligand, 4-11B ligand conjugate is one with the deleted epitopes recognized by endogenous (preexisting) specific antibodies. These epitopes may be replaced by amino acid substitutions producing sequences to which host antibodies do not react. For example, a dominant epitope on SEB recognized by anti-SEB antibodies is the sequence 225-234 (Nishi et al., J. Immunol. 158: 247-254 (1997) and an epitope on SEA recognized by anti-SEA antibodies is the sequence 121-149 (Hobieka et al., Biochem. Biophys. Res. Comm. 223: 565-571 (1996).

[0762] Preferentially, the tumor targeting structure in superantigen conjugate (e.g., tumor specific antibody, Fab or single chain fv fragments or tumor receptor ligand) has a greater affinity for the tumor than the SAg in the conjugate has for the MHC class II molecule thus favoring binding of the conjugate to the tumor over binding to all cells containing MHC class II receptors. Ideally the molecule has the following hierarchy of binding affinities: Tumor>TCR>MHC class II.

[0763] To further enhance the affinity of the tumor specific antibody in the conjugate for tumor cells in vivo, the tumor specific antibodies are used which are specific for more than one antigenic structures on the tumor, tumor stroma or tumor vasculature or any combination thereof. The tumor specific antibody or Fab′2, Fab or single chain Fv fragments are mono or divalent like IgG, polyvalent for maximal affinity like IgM or chimeric with multiple tumor (tumor stroma or tumor vasculature) specificities. Thus, when the SE or SPE-mAb conjugate is administered in vivo, it will preferentially bind to tumor cells rather than to endogenous SE antibodies or MHC class II receptors.

[0764] To reduce affinity of the SE-mAb conjugate for endogenous MHC class II binding sites, the high affinity Zn⁺⁺ dependent MHC class II binding sites in SEA, SEC2, SEC3, SED, SPEA, SPEC, SPEG, SPEH, SMEZ, SMEZ2, mycoplasma arthritides are deleted or replaced by inert sequence(s) or amino acid(s). These structural alterations in SE or SPEA reduce the affinity for MHC class II receptors from a K_{d} of 10⁻⁷ or 10⁻⁸ to 10⁻⁵. SEB, SEC and SSA and other SEs or SPEs do not have a high affinity Zn++ dependent MHC class II binding site but have multiple low affinity MHC class II binding sites (K_{d} 10⁻⁵-10⁻⁷). In these cases, alteration of the MHC class II binding sites is not always necessary to further reduce affinity for MHC class II receptors; at the very least mutation of one or two of the low affinity MHC class II binding sites will suffice in most instances.

[0765] Most importantly, tumor specific antibodies, Fab, F(ab)′2 or single chain Fab or Fv fragments in the SAg-mAb conjugate have a higher affinity for tumor antigens (K_{d} 10⁻⁵-10⁻¹⁴ or lower) than for the superantigen has for MHC class II binding sites (K_{d} 10⁻⁵ to 10⁻⁷) and its dominant epitope has for superantigen specific antibodies (K_{d} 10⁻⁷ to 10⁻¹¹). In this way, the conjugate will bind preferentially to the tumor target in vivo rather than preexisting antibodies or MHC class II receptors.

[0766] SAg-OX-40 ligand (OX-40L) or 4-1BB ligand (4-1BBL) fused to a tumor specific targeting structure is carried out using recombinant SAgs, the extracellular domains of OX-40L or 4-1BBL and the targeting structure (high affinity tumor specific fv fragments are preferred). The nucleic acids encoding the extracellular region of OX-40L (Godfrey et al., J. Exp. Med 180:757-762 (1994)) or 4-1BBL (Goodwin et al. Eur. J. Immunol. 23: 2631-2641 (1993); Melero I. et al., Eur. J. Immunol. 28: 1116-1121 (1998)) are fused in frame with nucleic acids encoding a SAg of any type (Example 5). SEA, SEB, SEC and Y. pseudotuberculosis are preferred. The SE may be modified to reduce antigenicity by modifying a dominant epitope (e.g., SEB 227-232) and to reduce toxicity by altering its MHC class II binding affinity (e.g., SEA D227A-high affinity Zn++ dependent binding site). The tumor targeting structure may include but is not limited to a receptor ligand or antibody. The antibody can take the form of F(ab)′₂, Fab, Fd or single chain fv fragments. Preferably, the affinity of the tumor targeting structure is of higher affinity for its tumor target than the affinity of the modified SAg for MHC class II receptors. High affinity single chain fv constructs that are specific for the OX-40 receptor and 4-1BB receptor may be used in place of the OX40L and 4-1BBL in the SAg-tumor targeting construct.

[0767] The SE-OX-40L (or 4-1BB)-tumor specific Fv conjugate or SE-mAb Fab-tumor-specific Fv conjugates described above are administered parenterally, intratumorally, intrathecally, intraperitoneally, intrapleurally by infusion or injection in conventional or sustained release vehicles as given in Section 66 in dosages of 0.01 ng/kg to 100 μg/kg using protocols given in Examples 5, 7, 14, 15, 16, 18-23, 38.

[0768] Superantigens Conjugated to Anti-apoptotic Cytokines and Tumor Specific Antibody, Fab or Single Chain Fv Fragments

[0769] It is well established that superantigen stimulation of T cells can result in activation driven cell death in vivo and in vitro. Several cytokines and LPS are known to interdict this process. Cytokines IL-2, IL-4, IL-7 and IL-15 are known to prevent superantigen stimulated T cells from undergoing apoptosis in vivo and in vitro (Vella et al., Proc. Natl. Acad. Sci. 95: 3810-3815 (1998)). Accordingly, superantigen-mAb conjugate as described above is further fused to an T cell anti-apoptotic cytokine. The extracellular domain of at least one cytokine from a group consisting of IL-2, IL-4, IL-7 and IL-15 is fused recombinantly to the SAg by methods given in Example 5. Other anti-T cell apoptosis agents such as LPS preparations of low virulence or a lipid A component (modified to induce less toxicity) are also effective antiapoptotic agents when conjugated biochemically to the superantigen-mAb (or F(ab)′₂, Fab, Fd or single chain fv fragments) conjugate or if administered concomitantly with the SAg.

[0770] The SE-antiapoptotic conjugates described above are administered parenterally, intratumorally, intrathecally, intraperitoneally, intrapleurally by infusion or injection in conventional or sustained release vehicles as given in Section 66 in dosages of 0.01 ng/kg to 100 μg/kg using protocols given in Examples 5, 7, 14, 15, 16, 18-23, 38.

### 68. Superantigens for Treatment of Malignant Masses, Malignant Ascites and Malignant Pleural Effusions

[0771] The present invention contemplates the use of the superantigens and SETs in any form including but not limited to Superantigens and SETs of any kind including but not limited to staphylococcal enterotoxins A, B, C, D, E, F, G H, I, J, K, L, M, streptococcal pyrogenic exotoxins, Y. pseudotuberculosis superantigen, M. arthitidis, C. perfringens exotoxin for direct administration into cavities or spaces, e.g., peritoneum, thecal space, pericardial and pleural space containing tumor.

[0772] The present invention contemplates the direct injection of any superantigen although SEA, SEB and SEC are preferred into fluid spaces containing tumor cells or adjacent to membranes such as pleural, peritoneal, pericardial and thecal spaces containing tumor. These sites display malignant ascites, pleural and pericardial effusions or meningeal carcinomatosis. The superantigen is preferably administered after partial or complete drainage of the fluid (e.g., ascites, pleural or pericardial effusion) but it may also be administered directly into the undrained space containing the effusion, ascites and/or carcinomatosis. In general, the SE dose is varied from 1 picogram to 10 μg and given every 3 to 10 days. It is continued until there is no reaccumulation of the ascites or effusion. Therapeutic responses are considered to be no further accumulation of four weeks after the last intrapleural administration.

[0773] In the US and Western Europe, there are 300,000 new cases of malignant pleural effusion annually. It is caused by lung cancer (35%), breast cancer (25%), lymphoma (10%), unknown primary malignancy (30%). It is the presenting manifestation in 10-50% of all cancers. Fifty percent of cancer patients develop pleural effusion at some point in their disease and up to 75% of MPEs are symptomatic on presentation. Its appearance signifies Stage IIIb or IV disease. The prognosis is 3-4 months.

[0774] Malignant ascites is associated with ovarian tumors (30-50%). Endometrial, breast, colonic, gastric and pancreatic carcinomas make up more than 80% or the tumors associated with intra-abdominal seeding and ascites formation. Ascites may be the presenting manifestation in 4-69% of cases.

[0775] The major therapies for malignant pleural effusion include talc poudrage, talc slurry, doxycycline and bleomycin instillation. These therapies require 3-12 days of hospitalization with EKG and oximetry monitoring. A chest tube is inserted and the medication is infused and allowed to distribute over the pleural membranes. The chest tube is then connected to closed negative pressure water seal drainage until pleural fluid volume is <10° C.c/24 hours. Respiratory therapy is usually given at least once daily.

[0776] Talc poudrage requires the use of operating room for thoracostomy and talc insufflation, general anesthesia and recovery room observation. Talc suffers from respiratory complications in up to 33% of patients and acute respiratory distress and hypoxemia in 10% of patients. Bleomycin and Doxycycline have response rates of 50% and 70% respectively and both require continuous chest tube drainage until the output is <100 cc/24 hours.

[0777] Intrapleurally administered chemotherapeutic agents Cisplatin, Cytarabine, fluorouracil, Etoposide, Mitomycin C, radiation and biologic agents IL-2, IFN-α and β, Corynebacterium parvum have been ineffective against MPEs. Thoracentesis or chest tube drainage alone results in recurrence rates of 98% and 85% respectively within 30 days. Intraperitoneal cisplatin and etoposide has produced a complete response rate of 30% of malignant ascites. However the only randomized study has failed to show any benefit for intraperitoneal therapy over conventional intravenous chemotherapy in the initial management of stage II C to IV ovarian cancer. No definitive success of various biologic agents, e.g., IFN-α, β, and γ, TNF or IL-2. Systemic chemotherapy in ascites associated with ovarian carcinoma can achieve a 5 year survival of 50% in stage I and II.

[0778] In contrast to Bleomycin and Doxycycline, superantigen instillation into the pleural space has a response rate of near 100% and does not require continuous chest tube drainage until the 24 hour output is <10° C.c. The superantigen is administered immediately after removal of pleural fluid via thoracentesis. On an average, this procedure is repeated once weekly for three treatments after which there is generally no further fluid accumulation. It is carried out entirely in an outpatient setting and requires no hospitalization at a cost several hundred percent below that of existing therapy. Major costs of the other therapies originating from hospitalization, chest tube insertion, operating and recovery room expense, respiratory therapy and in-hospital chest tube drainage, are eliminated.

[0779] Patients with malignant pleural effusions confirmed by biopsy or pleural fluid cytology are entered. They have not been undergoing any other anticancer treatment for at least one month and have a clinical Karnofsky status of at least 60-70%. SEA in doses of 10-30 ng is administered intrapleurally once or twice weekly immediately after drainage of the effusion via conventional thoracentesis. This procedure is performed once or twice weekly in an outpatient or office setting. Treatment is continued once weekly until effusion does not recur.

[0780] An objective response is recognized as no reaccumulation of pleural fluid 30 days after treatment (DeCamp M M et al., Chest 112: 291S-295S (1997); Fenton K N et al., Am J. Surg. 170: 69-74 (1995)).

[0781] There are 90 evaluable patients with malignant pleural effusions treated with intrapleural SEA. All patients have stage IIIb or stage IV lung cancer. There are 50 evaluable patients with malignant ascites.

[0782] Eighty five patients with pleural effusions exhibit objective clinical responses for a response rate of 94.5%. Effusion reaccumulation (at weekly intervals) progressively diminished after each SEA treatment. An example of progressive reduction of effusion reaccumulation after each treatment is shown below. Patients required an average of three treatments before there was no significant reaccumulation. However, several patients require only one treatment to eliminate fluid reaccumulation. Forty five patients with malignant ascites show objective responses for a response rate of 90%.

[0783] Toxicity in both malignant pleural effusion and ascites consists of mild short-lived fever, fatigue and anorexia not requiring treatment. CBC, renal and liver functions tests did not change significantly after treatments.

[0784] The superantigen has better therapeutic efficacy for malignant pleural effusions and ascites without the discomfort and complications associated with an indwelling draining chest tube. In the case of pleural effusion, It is also 90% more cost-effective compared to existing therapy since it is carried out in an outpatient facility and does not involve the major costs associated with hospitalization, i.e., chest tube insertion, operating and recovery room, indwelling chest tube drainage and respiratory therapy.

### 69. Intratumorally Administered Superantigens

[0785] The present invention contemplates the use of the superantigens and SETs in any form including but not limited to Superantigens and SETs of any kind including but not limited to staphylococcal enterotoxins A, B, C, D, E, F, G H, I, J, K, L, M, streptococcal pyrogenic exotoxins, Y. pseudotuberculosis superantigen, M. arthitidis superantigen, C. perfringens exotoxin for direct intratumoral treatment of tumor masses. Tumor masses appearing in any organ, palpated or visualized on x-ray, CT scan or MRI ultrasound are injected directly with any of the superantigens.

[0786] The superantigen is administered by injection or infusion directly into the tumor mass and is carried out with fluoroscopic, CT guidance or ultrasound guidance. For intratumoral administration, SE is dissolved in a conventional fluid vehicle such as saline or it may be incorporated into a controlled release formulation (mixture or suspension) preferably biodegradable. All of the biocompatible and biodegradable and controlled release formulations given in section 66 are useful. These formulations also include but are not limited to, ethylene-vinyl acetate (EVAc: Elvax 40W, Dupont), bioerodible polyanhydrides, polyimino carbonate, sodium alginate microspheres and hydrogels. Dosages used range from 1 ng to 10 mg. The poly-(D-, L- or DL-lactic acid/polyglycolide) copolymers are preferred.

[0787] Use of Intratumoral Superantigen with Chemotherapy

[0788] The SE are used for intratumoral injection. This is done with fluoroscopic, CT or ultrasound guidance. For intratumoral administration, SE is dissolved in a conventional fluid vehicle such as or it may be incorporated into a controlled release formulation (mixture or suspension) preferably biodegradable. All of the biodegradable controlled release formulations given in section 64 are useful although the poly d-1 glycolides are preferred because of biocompatibility and biodegradability.

[0789] A variety of chemotherapeutic agents may be used in the combined treatment methods disclosed herein. Chemotherapeutic agents contemplated as exemplary include, e.g., cisplatin (CDDP), adriamycin, actinomycin, mitomycin, carminomycin, daunomycin, doxorubicin, tamoxifen, taxol, taxotere, vincristine, vinblastine, vinorelbine, etoposide (VP-16), 5-fluorouracil (5FU), cytosine arabinoside, cyclophosphamide, thiotepa, methotrexate, campothecin, actinomycin-D, mitomycin C, aminopterin, combretastatin(s) and derivatives and prodrugs thereof. Anti-cancer chemotherapeutic drugs useful in this invention include but are not limited to antimetabolites, anthracycline, vinca alkaloid, anti-tubulin drug, antibiotic, alkylating agent.

[0790] The chemotherapeutic agent(s) selected for use preferably shows the highest response rate against tumor to be treated. For example, in non-small cell lung cancer, the cisplatin-based trials showed a benefit of chemotherapy with a hazard ratio of 0.73 (p<0.0001), equivalent to an absolute improvement in survival of 10% (5-15%) at 1 year, or an increase in median survival of 1½ months (1-2½ months).Completed prospective randomized trials including quality-of-life analyses show that cisplatin-based therapeutic regimens also improve quality of life in these patients. Other agents in phase III trials in patients with advanced NSCLC include the taxanes (paclitaxel and docetaxel), vinca alkaloid (vinorelbine), antimetabolite (gemcitabine), and campothecin (irinotecan). These agents have shown promise in both phase I and II trials, both as single agents and in combination with a platinum agent.

[0791] Example 73 provides the chemotherapeutic agents preferred for use in various malignancies. These agents would be used as single agents or combined with other agents in full doses or in doses 10-95% below the recommended dose. They may be delivered intratumorally alone or together with SE in doses 5-50% (e.g., 5-10 mg weekly for 2-7 weeks) below the systemic dose of the drug per cycle. Cisplatin is preferentially delivered intratumorally in a small volume (2-5 ml) of saline which produces a highly viscous solution that has the benefit of being retained for sustain periods in the tumor. The SE can be administered together with the cisplatin in the same or separate syringe or in two separate syringes. Preferred tumors to treat are solitary nodules in organs located close to the skin surface including but not limited to hepatocellular carcinoma, lung tumors, brain tumors, head and neck tumors, unresectable breast tumors. The optimal chemotherapeutic agents and combined regimens for all the major human tumors are set forth in Bethesda Handbook of Clinical Oncology, Abraham J et al., Lippincott William & Wilkins, Philadelphia, Pa. (2001); Manual of Clinical Oncology, Fourth Edition, Casciato, D A, Lowitz, B B, Lippincott William & Wilkins, Philadelphia, Pa. (2000) which are herein incorporated in entirety by reference.

[0792] As will be understood by those of ordinary skill in the art, the appropriate doses of chemotherapeutic agents will be generally around those already employed in clinical therapies wherein the chemotherapeutics are administered alone or in combination with other chemotherapeutics. By way of example only, agents such as cisplatin, and other DNA alkylating may be used. Cisplatin has been widely used to treat cancer, with efficacious doses used in clinical applications of 20 mg/m² for 5 days every three weeks for a total of three courses. Cisplatin is not absorbed orally and must therefore be delivered via injection intravenously, subcutaneously, intratumorally or intraperitoneally.

[0793] Further useful agents include compounds that interfere with DNA replication, mitosis and chromosomal segregation. Such chemotherapeutic compounds include adriamycin, also-known as doxorubicin, etoposide, verapamil, podophyllotoxin, and the like. Widely used in a clinical setting for the treatment of neoplasms, these compounds are administered through bolus injections intravenously at doses ranging from 25-75 mg/m² at 21 day intervals for adriamycin, to 35-50 mg/m² for etoposide intravenously or double the intravenous dose orally.

[0794] Agents that disrupt the synthesis and fidelity of polynucleotide precursors may also be used. Particularly useful are agents that have undergone extensive testing and are readily available. As such, agents such as 5-fluorouracil (5-FU) are preferentially used by neoplastic tissue, making this agent particularly useful for targeting to neoplastic cells. Although quite toxic, 5-FU, is applicable in a wide range of carriers, including topical, however intravenous administration with doses ranging from 3 to 15 mg/kg/day being commonly used

[0795] In non-small cell lung cancer, the cisplatin-based trials showed an absolute improvement in survival of 10% (5-15%) at 1 year, or an increase in median survival of 1½ months (1-2½ months). Cisplatin-based therapeutic regimens also improve quality of life in these patients. Other agents in phase III trials in patients with advanced NSCLC include the taxanes (paclitaxel and docetaxel), vinca alkaloid (vinorelbine), antimetabolite (gemcitabine), and camptothecin (irinotecan). These agents have shown promise in both phase I and II trials, both as single agents and in combination with a platinum agent. One-year survival rates of up to 40% have been commonly reported.

[0796] Suggested single and combination chemotherapy regimens for non-small cell lung cancer, breast cancer and hepatocellular cancer and chemotherapeutic agents commonly used for various malignancies are given in Example 73.

[0797] Other agents and therapies that are operable after intratumoral superantigen include, radiotherapeutic agents, antitumor antibodies with attached anti-tumor agents such as plant fungus or bacteria-derived toxin or coagulant, ricin A chain, deglycosylated ricin A chain, a ribosome inactivating protein, a-sarcin, gelonin, aspergillin, restricticin, a ribonuclease, a epipodophillotoxin, diphtheria toxin, or Pseudomonas exotoxin. Additional cytotoxic, cytostatic or anti-cellular agents capable of killing or suppressing the growth or cell division of the tumor being treated include anti-angiogenic agents, apoptosis-inducing agents, coagulants, prodrug or tumor targeted form, tyrosine kinase inhibitors (Siemeister et al., 1998), antisense strategies, RNA aptamers and ribozymes against VEGF or VEGF receptors (Saleh et al., 1996; Cheng et al, 1996; Ke et al., 1998; Parry et al., 1999; each incorporated herein by reference).

[0798] Numerous tyrosine kinase inhibitors useful. These include, for example, the 4-aminopyrrolo[2,3-d]pyrimidines of U.S. Pat. No. 5,639,757, specifically incorporated herein by reference, which may also be used in combination with the present invention. Further examples of organic molecules capable of modulating tyrosine kinase signal transduction via the VEGFR2 receptor are the quinazoline compounds and compositions of U.S. Pat. No. 5,792,771, which is specifically incorporated herein by reference for the purpose of describing further combinations for use with the present invention in the treatment of angiogenic diseases.

[0799] Other agents such as steroids including the angiostatic 4,9(11)-steroids and C21-oxygenated steroids, as described in U.S. Pat. No. 5,972,922, specifically incorporated herein by reference, may be employed in combined therapy. U.S. Pat. Nos. 5,712,291 and 5,593,990, each specifically incorporated herein by reference, describe thalidomide and related compounds, precursors, analogs, metabolites and hydrolysis products, which may also be used in combination with the present invention to inhibit angiogenesis. The compounds in U.S. Pat. Nos. 5,712,291 and 5,593,990 can be administered orally.

[0800] Certain anti-angiogenic therapies have already been shown to cause tumor regressions, including the bacterial polysaccharide CM101 and the antibody LM609. CM101 is a bacterial polysaccharide that has been well characterized in its ability to induce neovascular inflammation in tumors. CM101 binds to and cross-links receptors expressed on dedifferentiated endothelium that stimulates the activation of the complement system. It also initiates a cytokine-driven inflammatory response that selectively targets the tumor. It is a uniquely antipathoangiogenic agent that downregulates the expression VEGF and its receptors. CM101 is currently in clinical trials as an anti-cancer drug, and can be used in combination herewith.

[0801] Thrombospondin (TSP-1) and platelet factor 4 (PF4) may also be used in combination with the present invention. These are both angiogenesis inhibitors that associate with heparin and are found in platelet .alpha.-granules. TSP-1 is a large 450 kDa multi-domain glycoprotein that is constituent of the extracellular matrix. TSP-1 binds to many of the proteoglycan molecules found in the extracellular matrix including, HSPs, fibronectin, laminin, and different types of collagen. TSP-1 inhibits endothelial cell migration and proliferation in vitro and angiogenesis in vivo. TSP-1 can also suppress the malignant phenotype and tumorigenesis of transformed endothelial cells. The tumor suppressor gene p53 has been shown to directly regulate the expression of TSP-1 such that, loss of p53 activity causes a dramatic reduction in TSP-1 production and a concomitant increase in tumor initiated angiogenesis.

[0802] PF4 is a 70aa protein that is member of the CXC ELR-family of chemokines that is able to potently inhibit endothelial cell proliferation in vitro and angiogenesis in vivo. PF4 administered intratumorally or delivered by an adenoviral vector is able to cause an inhibition of tumor growth.

[0803] Interferons and metalloproteinase inhibitors are two other classes of naturally occurring angiogenic inhibitors that can be combined with the present invention. The anti-endothelial activity of the interferons has been known since the early 1980s, however, the mechanism of inhibition is still unclear. It is known that they can inhibit endothelial cell migration and that they do have some anti-angiogenic activity in vivo that is possibly mediated by an ability to inhibit the production of angiogenic promoters by tumor cells. Vascular tumors in particular are sensitive to interferon, for example, proliferating hemangiomas can be successfully treated with IFNα.

[0804] Tissue inhibitors of metalloproteinases (TIMPs) are a family of naturally occurring inhibitors of matrix metalloproteases (MMPs) that can also inhibit angiogenesis and can be used in combined treatment protocols. MMPs play a key role in the angiogenic process as they degrade the matrix through which endothelial cells and fibroblasts migrate when extending or remodeling the vascular network. In fact, one member of the MMPs, MMP-2, has been shown to associate with activated endothelium through the integrin .alpha.v.beta.3 presumably for this purpose. If this interaction is disrupted by a fragment of MMP-2, then angiogenesis is downregulated and tumor growth is inhibited.

[0805] SEA-Chemotherapy Outcomes

[0806] Patients with malignant masses confirmed by biopsy or cytology are entered. They have not been undergoing any other anticancer treatment for at least one month and have a clinical Karnofsky status of at least 60-70%. SEA is used as the prototypical SAg but other SAgs and homologues as defined in Section 62 can be used as well in comparable doses. SEA is administered in doses of 0.01 ng-100 ug/kg ng intratumorally once every 2-7 days. The tumors are accessible percutaneously. Others may be visualized and treated via bronchoscopy or stereotactically in the case of brain tumors. The low dose chemotherapy is started preferably within 36 hours after the last treatment according to protocols in Example 73. Chemotherapy may be started at the same time as immunotherapy, however, it is preferable to start chemotherapy within 36 hours after the second to fourth dose of SEA. Chemotherapy is given preferably in subtherapeutic doses (10-95% below the FDA approved dosage per cycle) but full therapeutic doses are also useful. Responses are classified according to the WHO and RECIST criteria in Abraham et al., supra. Patients receive two and eight weeks of therapy.

[0807] There are 100 evaluable patients with malignant masses treated with intratumoral SEA. All patients have stage IIIb or stage IV lung cancer. Eighty five patients exhibit objective clinical responses for a response rate of 85%. Tumors generally start to diminish and objective remissions are evident after four weeks of combined SEA-chemotherapy. Responses endure for an average of 24 months.

[0808] Toxicity consists of mild short-lived fever, fatigue and anorexia not requiring treatment. CBC, renal and liver functions tests do not change significantly after treatments. The SAg—chemotherapy has better response rate and duration of remission than either agent alone with minimal toxicity.

### 69. Use of Superantigens as a Vaccine or against Established Infectious Disease

[0809] The present invention contemplates the use of superantigens in any form to combat or boost host immunity to infectious diseases. The superantigen is used as a vaccine and is delivered together with or within 12 days after the administration of the infectious agent or a component (antigenic structure) of the infectious agent, a homologue or fragment of the infectious agent or a surrogate or the infectious agent. The infectious agent is a virus, bacterium, fungus. Parasite or protozoan. The superantigen is also used to treat established infectious diseases. For example, a superantigen is administered directly into a tuberculosis pleural effusion or ascites or directly into a tuberculous granuloma or abscess. For use as a vaccine, the superantigen is administered parenterally by infusion or injection. It is also administered intrathecally, intrapleurally or intrapertioncally. It is dissolved in conventional diluents known in the art or in sustained release vehicles as given in section 66. For use in an established infection such as an empyema, pleural effusion or ascites of bacterial, fungal or tuberculous origin, superantigen is preferentially given intrapleurally or intraperitoneally respectively. Doses of the superantigen given in soluble form are 1 ng to 50 μg and in sustained release preparations, 1 ng to 50 mgs. The superantigen in soluble form is administered once every 3-10 days for 2-7 treatments until there are signs that the pleural effusion or ascites is not reaccumulating and a granuloma or abscess is regressing. When used in sustained release preparations against established infection, the superantigen is administered once weekly for 3-7 treatments of once monthly for 3-7 months.

[0810] In all of these situations, the costimulant ligands OX-40 and 4-11B are administered together with the superantigen and up to 5 days afterward by injection or infusion by intravenous, intramuscular, subcutaneous, intrapleural, intraperitoneal, intralesional or intrathecal routes in doses of 0.2 ng/kg to 20 m/kg for each treatment.

### 70. Amplification of the α-1,4-Digalacosyl-Ceramide Binding Unit of SAg

[0811] Abbreviations. GaOse₂ or galabiosylceramide, Gal(α1-4)Gal/β1-ceramide: GbOse₃, or globotriaosylceramide Gal(α1-4)Gal(β1-4)Glcβ-1 ceramide; GbOse₄ or globotetraosyl ceramide. GalNac(β1-3)Gal(α1-4)Gal(β1-4)Glc ceramide.

[0812] The structure of the amino-terminal domain of SEs closely resembles the oligosaccharide/oligonucleotide-binding fold (OB fold) characteristic of verotoxin-1, cholera toxin, pertussis toxin, AB5 toxins from E. coli and the active domain of metalloprotease-2. The superantigen SEB binds to the GaOse₂ or galabiosylceramide receptor on cultured human proximal tubular epithelial cells (Chatterjee et al., Glycobiology 5:327-333 (1995)). GaOse₂ and Globotriaosylceramide (GbOse₃) are recognized by human verotoxins (verotoxin-1, verotoxin-2 and verotoxin 2c) (Boyd et al. Eur. J Biochem. 223:873-8 (1994)). It is essential that the Gal(α1-4)Gal is terminal on the carbohydrate sequence to permit verotoxin binding since digestion of the glycolipids with α-galactosidase resulted in loss of toxin binding. In TLC overlay experiments, the GaOse₂ is the most effective verotoxin receptor. Verotoxin binds to astrocytoma cells, ovarian carcinoma and Burkitt's lymphoma cells (Farkas-IIimsley et at., Proc. Natl. Acad Sci. 92: 6996-7000 (1995); Arab et al., J. Neuro-Onc. 40: 137-150 (1998)) presumably via the GbOse₃ and induces apoptosis. Several SEs are known to bind to several MHC class II negative tumors such as colon adenocarcinomas and squamous cell carcinoma cells and induce T cell mitogenesis or SDCC (Dohlsten et al., Eur. J. Immunol. 21:1229 (1991); Hermann et al., J. Immunol. 146:2504-2512 (1991); Lamphear et al. J. Immunol. 160:615 (1998)). In the present invention, SAgs bind to GaOse₂ receptor moieties overexpressed on carcinoma cells and other malignant cells just as ovarian carcinoma cells express 1000 fold more GbOse₃ than normal ovarian cells.

[0813] In the present invention, the OB fold of the verotoxin-1 (any other verotoxin) is fused to the native SE molecule. SEB, SEC1, SED and SEA are preferred superantigens for this purpose. The addition of this moiety confers the SE with enhanced recognition of the GaOse₂ structures on target tumor cells. The fusion of the verotoxin OB fold to the SE is accomplished recombinantly fusing the verotoxin GaOse₂ coding region (in its OB fold) to SEB preferably at its C terminus (away from the OB fold in the amino terminal domain). In an additional embodiment, the OB fold of the superantigen is duplicated to provide additional ligand for binding to tumor cells expressing the receptors for this ligand.

[0814] In an additional embodiment, the Shiga toxin A subunit is fused to the superantigen. The A subunit of the verotoxin is capable of binding to verotoxin receptors on tumor cells where it is internalized and cleaved to a product that interferes with post translational ADP ribosylation.

[0815] The SE-verotoxin conjugate is used to treat tumors or enhance antitumor immunity. For this purpose it is administered parenterally, intratumorally, intrathecally, intraperitoneally, intrapleurally by infusion or injection in conventional or sustained release vehicles as given in Section 66 in dosages of 0.01 ng/kg to 100 μg/kg using protocols given in Examples 5, 7, 14, 15, 16, 18-23, 38.

### 71. Coaguligands: SEs Fused to Coagulation Factors

[0816] Superantigens may be conjugated to, or operatively associated with, polypeptides that are capable of directly or indirectly stimulating coagulation, thus forming a “coaguligand” (Barinaga M et al., Science 275:482-4 (1997); Huang X et al., Science 275:547-50 (1997); Ran S et al., Cancer Res Oct. 15 1998;58(20):4646-53; Gottstein C et al., Biotechniques 30:190-4 (2001)).

[0817] In coaguligands, the antibody may be directly linked to a direct or indirect coagulation factor, or may be linked to a second binding region that binds and then releases a direct or indirect coagulation factor. The ‘second binding region’ approach generally uses a coagulant-binding antibody as a second binding region, thus resulting in a bispecific antibody construct. The preparation and use of bispecific antibodies in general is well known in the art, and is further disclosed herein.

[0818] Coaguligands are prepared by recombinant expression. The nucleic acid sequences encoding the SAg are linked, in-frame, to nucleic acid sequences encoding the chosen coagulant, to create an expression unit or vector. Recombinant expression results in translation of the new nucleic acid, to yield the desired protein product.

[0819] Where coagulation factors are used in connection with the present invention, any covalent linkage to the SAg should be made at a site distinct from the functional coagulating site. The compositions are thus “linked” in any operative manner that allows each region to perform its intended function without significant impairment. Thus, the SAg binds to and stimulates T cells, and the coagulation factor promotes blood clotting.

[0820] Preferred coagulation factors are Tissue Factor (“TF) compositions, such as truncated TF (tTF), dimeric, multimeric and mutant TF molecules. “Truncated TF” (tTF) refers to TF constructs that are rendered membrane-binding deficient by removal of sufficient amino acid sequences to effect this change in property. A “sufficient amount” in this context is an amount of transmembrane amino acid sequence originally sufficient to enter the TF molecule in the membrane, or otherwise mediate functional membrane binding of the TF protein. The removal of such a “sufficient amount of transmembrane spanning sequence” therefore creates a truncated TF protein or polypeptide deficient in phospholipid membrane binding capacity, such that the protein is substantially a soluble protein that does not significantly bind to phospholipid membranes. Truncated TF thus substantially fails to convert Factor VII to Factor VIIa in a standard TF assay, and yet retains so-called catalytic activity including activating Factor X in the presence of Factor VIIa.

[0821] U.S. Pat. No. 5,504,067 is specifically incorporated herein by reference describes truncated TF proteins. Preferably, the TFs for use herein will generally lack the transmembrane and cytosolic regions (amino acids 220-263) of the protein. However, there is no need for the truncated TF molecules to be limited to molecules of the exact length of 219 amino acids.

[0822] Any of the truncated, mutated or other TF constructs maybe prepared in a dimeric form. TF dimers are prepared by employing the standard techniques of molecular biology and recombinant expression, in which two coding regions are prepared in-frame and expressed from an expression vector. Equally, various chemical conjugation technologies may be employed to prepare TF dimers. The individual TF monomers may be derivatized prior to conjugation.

[0823] The tTF constructs may be multimeric or polymeric. A “polymeric construct” contains 3 or more Tissue Factor constructs. A “multimeric or polymeric TF construct” is a construct that comprises a first TF molecule or derivative operatively attached to at least a second and a third TF molecule or derivative. The multimers may comprise between about 3 and about 20 such TF molecules. The constructs may be readily made using either recombinant manipulation and expression or using standard synthetic chemistry.

[0824] TF mutants deficient in the ability to activate Factor VII are useful. Such “Factor VII activation mutants” are generally defined herein as TF mutants that bind functional Factor VII/VIIa, proteolytically activate Factor X, but are substantially free from the ability to proteolytically activate Factor VII. Accordingly, such constructs are TF mutants that lack Factor VII activation activity.

[0825] The ability of such Factor VII activation mutants to function in promoting tumor-specific coagulation is based upon their specific delivery to the tumor vasculature, and the presence of Factor VIIa at low levels in plasma. Upon administration of such a Factor VII activation mutant conjugate, the mutant will be localized within the vasculature of a vascularized tumor. Prior to localization, the TF mutant would be generally unable to promote coagulation in any other body sites, on the basis of its inability to convert Factor VII to Factor VIIa. However, upon localization and accumulation within the tumor region, the mutant will then encounter sufficient Factor VIIa from the plasma in order to initiate the extrinsic coagulation pathway, leading to tumor-specific thrombosis. Exogenous Factor VIIa could also be administered to the patient.

[0826] Any one or more of a variety of Factor VII activation mutants may be prepared and used in connection with the present invention. The Factor VII activation region generally lies between about amino acid 157 and about amino acid 167 of the TF molecule. Residues outside this region may also prove to be relevant to the Factor VII activating activity. Mutations are inserted into any one or more of the residues generally located between about amino acid 106 and about amino acid 209 of the TF sequence (WO 94/07515; WO 94/28017; each incorporated herein by reference).

[0827] A variety of other coagulation factors may be used in connection with the present invention, as exemplified by the agents set forth below. Thrombin, Factor V/Va and derivatives, Factor VIII/VIIIa and derivatives, Factor IX/IXa and derivatives, Factor X/Xa and derivatives, Factor XI/XIa and derivatives, Factor XII/XIIa and derivatives, Factor XIII/XIIIa and derivatives, Factor X activator and Factor V activator may be used in the present invention.

[0828] These conjugates are administered intrathecally by in dosages of 0.01 ng/kg to 100 μg/kg.

### EXAMPLE 1

### Preparation of Plasmids for making DNA Templates for any Gene of Interest and the Process of Transfection

[0829] Mammalian oncogenes, and genes for oncogenic transcription factors, angiogenic factors, growth factor receptors and amplicons as well as bacterial and SAg plasmids and DNA are prepared as described in the text references. When necessary, they are modified to forms suitable for transfection into mammalian tumor cells or accessory cells using methods well described in the art. (Old R W et al., Principles of Gene Manipulation, 5^{th} Ed., Blackwell 1994).

[0830] As a representative SAg, enterotoxin B plasmid DNA is prepared by the method of Jones C L et al., J. Bacteriology 166 29-33 (1986) and Ranelli et al., Proc. Natl. Acad. Sci. USA 82:5850-5854 (1985) using the CsCl-ethidium bromide density gradient centrifugation of cleared lysates as described (Clewell, D B et al., Proc. Natl. Acad. Sci. USA 62-1159-1166 (1969)). S. aureus chromosomal DNA was isolated as described by Betley M et al., Proc. Natl. Acad. Sci. USA 81: 5179-5183 (1984). E. coli HB101 was transformed with plasmid DNA by the CaCl2 procedure of Morrison D A et al., Meth. Enzymol. 68:326-331 (1979). Restriction digests were analyzed by 1% agarose and 5% acrylamide gel electrophoresis using Tris/Borate/EDTA buffer as described in Greene P J et al., Methods Mol Biol. 7: 87-111 (1974). Additional methods for isolation and cloning of specific bacterial and mammalian plasmid DNA useful in tumor or accessory cell transfection are cited in references given previously in the text or in Snyder L et al., Molecular Genetics of Bacteria, ASM Press, Washington, D.C. (1997); Peters et al., supra; Franks et al., supra.

[0831] Suitable template DNA for production of mRNA encoding a desired polypeptide may be prepared using standard recombinant DNA methodology as described in Ausubel F et al. Short Protocols in Molecular Biology 3^{rd} Ed. John Wiley, New York, N.Y. (1995). There are numerous available cloning vectors and any cDNA containing an initiation codon can be introduced into the selected plasmid and mRNA can be prepared from the resulting template DNA. The plasmid can be cut with an appropriate restriction enzyme to insert any desired cDNA coding for a polypeptide of interest. For example the readily available cloning vector pSP64T can be used after linearization and transcription with SP6 RNA polymerase. Smaller sequence may be inserted into the Hind III/EcoTI fragment with T4 ligase. Resulting plasmids are screened for orientation and transformed into E. coli. These plasmids are adapted to receive any gene of interest at a unique BglII restriction site which is placed between the two Xenopus β-globin sequences.

[0832] Subcloning of SEB into pHβ-Apr-1-Neo Expression Vector

[0833] The Staphylococcal enterotoxin B (SEB) gene has been subcloned into pHβ-Apr-1-neo expression vector. The final construct contained only the coding sequence of SEB: and conferred resistance to ampicillin and G-418.

[0834] Materials and Methods

[0835] PCR:

[0836] 1. The following two primers are designed and made at Life Technologies, Inc.: Primer SEB 1: total 24 bp 5′ to 3′ GGCGTCGACATGTATAAGAGATTA SalI site Primer SEB2: total 24 bp 5′ to 3′ GCCGGATCCTCACTTTTTCTTTGT BamHI site Both primers were dissolved in filter-sterilized ddH2O to a final concentration of 20 mM (stock solution).

[0837] 2.The volume (in ml) of reagents for each PCR reaction is listed below:

| | Exp. | Exp. | Exp. | Exp. | Exp. |
|---|---|---|---|---|---|
| Reagent | 1 | 2 | 3 | 4 | 5 |
| ddH2O | 76 | 72 | 67 | 49 | 59 |
| 10 × PCR buffer | 10 | 10 | 10 | 10 | 10 |
| 10 × dNTP(2 mM stock) | 10 | 10 | 10 | 10 | 10 |
| Primer SEB1 (20 mM stock) | 1 | 5 | 1 | 10 | 10 |
| Primer SEB2 (20 mM stock) | 1 | 1 | 1 | 10 | 10 |
| SEE Template (50 mg stock) | 1 | 1 | 10 | 10 | 0 |
| Pfu Turbo Enz | 1 | 1 | 1 | 1 | 1 |
| Final Volume | 100 | 100 | 100 | 100 | 100 |

[0838] 3. The following cycling parameters were applied:

[0839] 95° C. 1 minute 1 cycle initial denature

[0840] 95° C. 45 seconds denature

[0841] 52° C. 1 minute 20 cycles anneal

[0842] 72° C. 1 minute extension

[0843] 72° C. 1 minute 1 cycle final extension

[0844] 4° C. hold

[0845] 4. To verify that the PCR reactions yielded the correct size fragment, 10 ml of the reaction mixture was electrophoresed on a 1% agarose gel in 1×TAE buffer.

[0846] Vector

[0847] 1. The pHβ-Apr-1-neo expression vector was spotted the vector on a filter paper. See FIG. 1

[0848] 2. To recover the DNA, the circle was cut out and added to 100 ml of H₂O to allow rehydration for 5 minutes. After a brief centrifugation, the supernatant was used to transform E. coli XL 1Blue (Stratagene), and selected by ampicillin (final concentration 100 mg/ml).

[0849] 3. To verify that the vector is correct, 4 ampR clones were randomly selected and the clones were cultured in LB amp media. DNA was isolated and digested with SalI, BamHI (single digest) and EcoRI/HindIII (double digest). The digested products were electrophoresed on a 1% agarose gel in 1×TAE buffer. The profile of the restriction digest confirmed that the vector is correct.

[0850] Cloning and Verification

[0851] 1. The correct PCR fragments in experiments 2, 3, and 4 were pooled and gel-purified. A portion of the fragments was digested with restriction enzymes SalI and BamHI, and was ligated into the digested pHβ-Apr-1-neo expression vector. The ligation products were transformed into E. coli XL1Blue (Stratagene). Insert containing clones were selected by ampicillin.

[0852] 2. Ten ampicillin resistant clones were randomly selected, cultured in 5 ml of LB amp media, and their plasmid DNA was isolated. Insert containing clones (SEB construct) were verified by digesting the DNA with SalI and BamHI restriction endonucleases and electrophoresis at 0.8% agarose gel. (See FIG. 2)

[0853] 3. One of the SEB constructs (clone #2) was verified by sequencing and aligned with the published SEB sequence in the “SEB and Clone #2 Coding Sequence Table” below, which shows alignment of the published SEB coding sequence and the newly constructed SEB gene in pHβ-Apr1 neo vector (Clone #2). Clone #2 was sequenced with 4 primers: SEB1, 2, 3, and 4. SEB1 and 2 are the PCR primers that were used for the amplification of the SEB gene.

[0854] SEB 3 (TATGAAAGTTTTGTATGATGAT) and SEB 4 (AGTGACGAGTTAGGTAATCT) are internal primers. The final sequence was confirmed by the multiple overlapping of sequences and aligned with the published SEB sequence. It is a perfect match. The start codon (ATG) and the stop codon (TGA) are underlined. The upstream and the downstream sequences are the human β-actin promoter and the SV40 polyA sequences in the pHβ-Apr1 neo vector with the addition of SalI and BamHI restriction enzyme sites.

SEB and Clone #2 Coding Sequence Table

[chemical structure]

[chemical structure]

[chemical structure]

[chemical structure]

[chemical structure]

[chemical structure]

[chemical structure]

[chemical structure]

[chemical structure]

[chemical structure]

[chemical structure]

[chemical structure]

[chemical structure]

[chemical structure]

[chemical structure]

[0855] Purified DNA templates from bacteria and human cells are prepared for introduction of plasmid into human and bacterial cells by additional methods given in Ausubel F et al., supra. The plasmid DNA is grown up in E. coli in ampicillin containing LB medium. The cells were then pelleted by spinning a 5000 rpm for 10 min. at 5000 rpm., resuspended in cold TE pH 8.0, centrifuged again for 10 minutes. at 5000 rpm., resuspended in a solution of 50 mM glucose, 25 mM Tris-Cl pH 8.0, 10 mM EDTA and 40 mg/ml lysozyme. After incubation for 5-10 min. with occasional inversion, 0.2 N NaOH containing 1% SDS was added, followed after 10 minutes at 0° C. with 3 M potassium acetate and 2 M acetic acid. After 10 more minutes, the material was again centrifuged a 6000 rpm, and the supernatant was removed with a pipet. The pellet was then mixed into 0.6 vol. isopropanol (−20° C.), mixed, and stored at −20° C. for 15 minutes. The material was then centrifuged again at 10,000 rpm for 20 min., this time in an HB4 singing bucket rotor apparatus after which the supernatant was removed and the pellet was washed in 70% EtOH and dried at room temperature. Next, the pellet was resuspended in 3.5 ml TE, followed by addition of 3.4 g CsCl and 350 l of 5 mg/ml EtBr. The resulting material was placed in a quick seal tube, filled to the top with mineral oil. The tube was spun for 3.5 hours at 80,000 rpm in a VTi80 centrifuge. The band was removed and the material was centrifuged again making up the volume with 0.95 g CsCl/ml and 0.1 ml or 5 mg/ml EtBr/ml in TE. The EtBr was then extracted with an equal volume of TE saturated N-Butanol after adding 3 volumes of TE to the band. Next, 2.5 vol. EtOH was added, and the material was precipitated at −20° C. for 2 hours. The resultant DNA precipitate is used as a DNA template.

[0856] Transfection of B16F10 Melanoma Cells

[0857] G418 sensitivity: B16F10 melanoma cells (B16s) were first tested for sensitivity to G418 which will be used as the selectable marker. At 400 μg/mL G418, B16s did not survive, while 200 and 300 μg/mL allowed some survival.

[0858] Lipofectamine was used to produce stably transfected B16 cells. The conditions for transfection were those described protocol provided by Life Technologies. B16s were plated at 4×105 cells/well in 6 well plates, using Murine Complete Medium (MCM) described in Report 2. Cells were cultured overnight. Optimal density is 50-80% confluent and is usually achieved by 18-24 after seeding at 1-3×105 cells/well. DNA sources consisted of SEB-G418 resistance containing vector, vector DNA with G418 resistance gene only, and control DNA from PSK401 (no G418 resistance marker). DNA concentrations were determined for the SEB containing and control vectors.

| DNA source | A₂₆₀ | DNA (μg/ml) |
|---|---|---|
| SEB | 0.09 | 0.45 |
| Vector only | 0.13 | 0.65 |
| PSK 401 | 0.15 | 0.75 |

[0859] Lipofectamine solutions and DNA solutions were prepared in 12×75 mm tubes, using OPTI-MEM (Life Technologiies 31985). DNA solutions contained approximately 2 μg in 100 uL OPTI-MEM; the LIPOFECTAMINE Reagent was diluted by adding 6 or 12 uL to OPTI-MEM at a final volume of 100 uL. The solutions were mixed and held at room temperature for 30 minutes. Specific DNA and Lipofectamine conditions were as follows:

[0860] Plated cells were rinsed once with 2 ml/well OPTI-MEM. To the above tubes, 0.8 mL OPTI-MEM. This mixture was then overlayed onto the washed cell monolayers according to the above well designations. Cells were incubated for 5 hours at 37° C. in 5% CO2. Murine Complete Medium with 20% FBS but no antibiotics was then added at 1 ml/well. Cultures were refed with standard MCM, at 3 mL/well, after 24 hours. Three days after transfection, cells from each transfection condition were subcultured by splitting the total cell suspension 90:10 into 150 mm plates (one plate received 90% of the cell suspension, the other received the remaining 10%).

[0861] G418 Selection

[0862] All plates were refed at 6 days after transfection with medium containing 400 μg/mL G418. Plates were refed every 2 to 3 days with G418 containing medium until day 17 after transfection. No growth was observed in wells 1-4 as expected. Plates initiated with 90% of the cell suspension and showing growth were harvested, frozen, and stored at −80° C.

[0863] Primary Subcloning

[0864] Ten colonies were selected from each well for wells 5, 7, 9, and 11. Subcloning was accomplished by the use of cloning cylinders as follows: After seating the cylinder, medium was aspirated and the isolated colony was washed once with 100 uL of warmed trypsin-EDTA. This was aspirated and replaced with fresh tyrpsin-EDTA. After incubation at 37° C. for 2 minutes, the cells were recovered by trituration and transferred to a tube containing 1 ml MCM, then replated by addition of 20 uL of cell suspension to 15 mL MCM with G418 in 150 mm plates. The remaining cell suspension was plated into 24 well plates, 4 wells/clone and all plates were maintained at 37° C., 5% CO2. The 6 well plates were used to assess SEB expression on the cell surface as described under Detection of positive clones.

[0865] Secondary and Tertiary Subcloning and Preparation of Frozen Stocks

[0866] These and all subsequent procedures were performed by me. Secondary subcloning was performed as above at 7 days after initiation of primary subclones. One colony/plate was selected for further subcloning (a total of 40 colonies) The cell suspension was prepared in a total volume of 1 mL; 100 uL was replated into 100 mm plates containing 10 mL MCM with G418. The remaining cell suspension was plated in 96 well plates at 100/well, 2 replicates for assay. The 96 well plate was used for detection of intracellular expression of SEB described under Detection of positive clones.

[0867] Primary subcloning plates were cultured one additional day, then harvested, frozen, and stored at −80° C. These frozen stocks are designated primary subclones. Secondary subclones were refed after 4 days. Of 40 secondary clones, 36 regrew. Tertiary subcloning was performed after 8 days and frozen stocks of secondary clones were prepared after 9 days. Tertiary clones were refed after 3 days in culture and subcultured after 7 days in culture. Plates were harvested, cells were resuspended in a total of 1 mL, and replated by addition of 100 uL of the cell suspension to 100 mm plates with 15 mL MCM or 100 μl/well in a 96 well plate. Frozen stocks of tertiary clones were prepared.

[0868] Generation of Conditioned Medium for Assay of Supernatants

[0869] After 7 days, 100 mm plates of tertiary clones were again replated. This time, cell counts were performed and 4.5×10⁵ cells were plated in 12 well plates, one well/clone. The remaining cell suspension was frozen and stored at −80° C. After 4 days in culture, supernatants were harvested, stored at 4° C., and the cells were replated into 100 mm plates. Supernatants were obtained from the 100 mm plates after 7 days in culture. See Detection of positive clones. Frozen stocks were also generated from these plates.

[0870] Development of ELISA with HRP Rabbit anti-SEB.

[0871] Final ELISA conditions were as follows:

[0872] Assay Plate ProBind (Falcon #3915)

[0873] Capture Antibody Rabbit anti-SEB (Toxin Technologies #LB1202), 10 μg/mL in PBS, 50 μl/well, 1 hr, RT

[0874] Wash 3× with 0.1% casein, 0.1% Tween 20 in PBS

[0875] Blocking 1% casein in PBS, 250 μl/well, overnight, 4° C.

[0876] Antigen Supernatant used neat or SEB diluted in PBS, 50 μl/well, 2 hr, RT

[0877] Wash As above

[0878] Primary Ab HRP Rabbit anti-SEB (Toxin Technologies #LBC202), 1/300 in block buffer, 50 μl/well, 2 hr, RT

[0879] Substrate OPD, 2.5 mg/mL in citrate buffer, pH 5.0, 0.03% H₂0₂, 100 μl/well, 15 min, RT

[0880] Stop 4M H₂SO₄, 100 μl/well

[0881] Read-out Absorbance at 490 nm (OD 490)

[0882] Results: SEB produced a dose response curve (linear range 60 fg-60 pg/mL) and the background was very low. Vector only clones produced only background signals. One SEB transfected clone produced a strong signal, three produced moderate signals, and one other produced a weak but definite signal.

Absorbance at 490 nm

| | SEB+ | | | Vector only | | |
|---|---|---|---|---|---|---|
| | 1 | 2 | mean | 1 | 2 | mean |
| 9.1 | 0.097 | 0.112 | 0.104 | 0.079 | 0.102 | 0.091 |
| 9.2 | 0.127 | 0.123 | 0.125 | 0.081 | 0.076 | 0.078 |
| 9.3 | 0.109 | 0.104 | 0.106 | 0.087 | 0.070 | 0.079 |
| 9.4 | 0.444 | 0.393 | 0.418 | 0.077 | 0.077 | 0.077 |
| 9.5 | 0.163 | 0.087 | 0.125 | 0.075 | 0.074 | 0.074 |
| 9.6 | 0.516 | 0.522 | 0.519 | 0.066 | 0.064 | 0.065 |
| 9.7 | 0.087 | 0.091 | 0.089 | 0.096 | 0.084 | 0.090 |
| 9.8 | 0.386 | 0.450 | 0.418 | 0.080 | 0.071 | 0.075 |
| 9.9 | 0.137 | 0.122 | 0.130 | 0.071 | 0.070 | 0.071 |
| 11.1 | 0.083 | 0.075 | 0.079 | 0.068 | 0.078 | 0.073 |
| 11.2 | 1.847 | 1.802 | 1.824 | 0.063 | 0.076 | 0.070 |
| 11.3 | 0.071 | 0.077 | 0.074 | 0.076 | 0.074 | 0.075 |
| 11.4 | 0.087 | 0.084 | 0.086 | 0.083 | 0.085 | 0.084 |
| 11.5 | 0.161 | 0.220 | 0.191 | 0.092 | 0.086 | 0.089 |
| 11.8 | 0.221 | 0.100 | 0.160 | 0.080 | 0.081 | 0.080 |
| 11.9 | 0.080 | 0.091 | 0.085 | 0.077 | 0.072 | 0.074 |
| 11.10 | 0.290 | 0.254 | 0.272 | 0.081 | 0.112 | 0.097 |
| 11.10 | 0.268 | 0.263 | 0.265 | 0.093 | 0.114 | 0.103 |

[0883] Based on the SEB standard curve, the following concentrations were derived.

| Clone number(pg/ml) | SEB |
|---|---|
| 11.2 | 4.146 |
| 9.6 | 0.152 |
| 9.4 | 0.118 |
| 9.8 | 0.118 |
| 11.10 | 0.081 |

[0884] Cells are transfected ex vivo or in vivo and implanted in a cancer-bearing host. These transfected cells are also used to stimulate host lymphocytes ex vivo. Once activated, the lymphocytes are administered to the host. The ex vivo or in vitro introduction of DNA into cells is accomplished by methods that (1) form DNA precipitates which are internalized by the target cell; (2) create DNA-containing complexes with charge characteristics that are compatible with DNA uptake by a target cell; or (3) result in the transient formation of pores in the plasma membrane of a target cell exposed to an electric pulse (these pores are of sufficient size to allow DNA to enter the target cell).

[0885] Generally, two factors determine the method used: the duration of expression required (i.e., transient versus stable expression) and the type of cell to be transfected. The specific details of exemplary procedures are described herein. Transfections are carried out by well established methods including calcium phosphate precipitations, DEAE Dextran transfection, and electroporation.

[0886] Calcium Phosphate Precipitation

[0887] A commonly used ex vivo and in vitro method to transfer DNA into recipient cells involves the co-precipitation of the DNA of interest with calcium phosphate. With this technique, DNA enters the cell in sufficient quantities such that the treated cells are transformed with relatively high frequency. Using a variety of cell types, transfection efficiencies of up to 10-3 have been obtained. This is the method of choice for the generation of stable transfectants.

[0888] Variations of the basic technique have been developed. If the transfection involves the transfer of plasmid DNA, then high molecular weight genomic DNA isolated from a defined cell or tissue source can be included. The addition of such DNA, called carrier DNA, often increases the efficiency of transfection by the plasmid DNA. Upon arrival of the plasmid DNA/carrier DNA/calcium phosphate co-precipitate to the nucleus of the treated cell, the plasmid DNA integrates into the carrier DNA, often in the tandem array, and this assembly of plasmid and carrier DNA, called a transgenome, subsequently integrates into the chromosome of the host cell.

[0889] Another procedural option is the addition of a chemical shock step to the transfection protocol. Either dimethylsulfoxide or glycerol are appropriate. The optimal concentrations and lengths of treatment vary according to cell type. The use of these agents dramatically affect cell viability and can be optimized as described elsewhere [Chen and Okayama, Mol. Cell. Biol. 7:2745 (1987)]. Specifically, incubation of cells with the co-precipitate is optimal at 35° C. in 2-4% CO2 for 15-24 hours. In addition, circular DNA is more active than linear DNA and a finer precipitate is obtained when the DNA concentration is between 20-30 mg/ml in the precipitation mix.

[0890] It is noted that incubator temperature, CO2 concentration, and DNA concentration can be varied to obtain the desired result. In addition, the temperature and CO2 concentrations described below are not optimal for cell growth and should be maintained only temporarily.

[0891] Method

[0892] Day 1: 1.3×106 cells are seeded per 100-mm dish. Cells are about 75% confluent when used to seed the dishes.

[0893] Day 2: A large calcium phosphate cocktail mixture to transfect many plates simultaneously is prepared. This protocol is given for 1 ml (or 1×100-mm dish equivalent) of solution. These amounts are scaled up as necessary, allowing for an appropriate amount of sample-transfer errors. Adherence to sterile technique is critical. Sterile reagents, tips, and tubes are used.

[0894] 1. Add 1-20 g DNA (1 mg/ml in sterile TE, 10 mM Tris-HCl 1 mM EDTA pH 7.05) to 0.45 ml sterile H2O. Note: First “sterilize” DNA by ethanol precipitation with NaCl (0.1M final aqueous concentration) and 2× volume 200% ethanol.

[0895] 2. Add 0.5 ml 2× HEPES buffered saline. Mix well.

[0896] 3. Add 50 ml of 2.5 M CaCl2, vortex immediately.

[0897] 4. Allow the DNA mixture to sit undisturbed for 15-30 minutes at room temperature.

[0898] 5. Add 1 ml of the DNA transfection cocktail directly to the medium in the 100-mm dish (plated with cells on day 1).

[0899] 6. Incubate the dishes containing the DNA precipitate for 16 hours at 37° C. Remove the media containing the precipitate and add fresh complete growth media.

[0900] 7. Allow the cells to incubate for 24 hours. Post-incubation, the cultures can be split for subsequent selection. Split cultures 1:5; however, to isolate individual colonies for further analysis, split cultures 1:10 and 1:100.

[0901] DEAE Dextran Transfection

[0902] Typically, DEAE dextran transfection is used to transiently transfect cells in culture. This method is highly efficient and the DNA/DEAE dextran mixture used for transfection is relatively easy to prepare. For example, this method yields transfection efficiencies of as high as 80 percent. DNA introduced into cells with this method, however, appears to undergo mutations at a higher rate than that observed with calcium phosphate-mediated transfection.

[0903] Method

[0904] Briefly, a DEAE dextran mixture is prepared and the DNA sample of interest is added, mixed, and then transferred to the cells in culture.

[0905] Day 1: Cells are seeded at a concentration of 2×10⁴ cells/cm2 in a total volume of 2 ml/well (1.92×10⁵ cells/well of a six-well cluster dish). Cells should be about 75% confluent when used to seed the dishes.

[0906] Day 2: Resuspend 0.5 ml DEAE Dextran in Tris-buffered saline (TBS).

[0907] Final DEAE Dextran concentration should be about 0.04%. Observe cell monolayers microscopically. Cells should appear about 60-70% confluent and well distributed. Bring all reagents to room temperature. Aspirate off growth media and wash monolayer once with 3 ml of phosphate buffered saline (PBS), followed by one wash with 3 ml of TBS. Aspirate off TBS solution and add 100-125 ml of the appropriate DNA/DEAE-Dextran/TBS mixture to the wells. Incubate dishes at room temperature inside a laminar flow hood. Rock the dishes every 5 minutes for 1 hour, making sure the DNA solution covers the cells. After the 1-hour incubation period, aspirate off the DNA solution and wash once with 3 ml of TBS followed by 3 ml of PBS. Remove the PBS solution by aspiration and replace with 2 ml of complete growth media containing 100 M chloroquine. Incubate the dishes in an incubator set at 37° C. and 5% CO2 for 4 hours. Remove the media containing chloroquine and replace with 2-3 ml of complete growth media (no chloroquine). Incubate the transfected cells for 1-3 days, after which the cells will be ready for analysis. The exact incubation period depends on the intent of the transfection. Optimal expression typically occurs at 3days post-transfection.

[0908] Electroporation

[0909] Electroporation is a process whereby cells in suspension are mixed with the DNA to be transferred. This cell/DNA mixture is subsequently exposed to a high-voltage electric field. This creates pores in the membranes of treated cells that are large enough to allow the passage of macromolecules such as DNA into the cells. Such DNA molecules are ultimately transported to the nucleus and a subset of these molecules are integrated into the host genome. The reclosing of the membrane pores is both time and temperature dependent and thus is delayed by incubation at 0° C., thereby increasing the probability that the molecule of interest will enter the cell.

[0910] Electroporation appears to work on virtually every cell type. With this technique, the efficiency of nucleic acid transfer is high for both transient transfection and stable transfection. One important technical difference between electroporation and other competing technologies is that the number of input cells required for electroporation is considerably higher.

[0911] Method

[0912] 1. Harvest exponentially growing cells such as tumor cells or accessory cells by trypsinization, pellet, and wash twice with electroporation buffer (Kriegler, M. Gene Transfer and Expression, W. H. Freeman and Co., New York, N.Y. (1991)).

[0913] 2. Resuspend cells in electroporation buffer at a concentration of 2-20×10⁶ cells/ml in an electroporation cuvette.

[0914] 3. Add 5-25 mg of DNA that has been linearized to the cell suspension

[0915] 4. Insert or connect the electroporation electrode according to the manufacturer's instructions and subject cell/DNA mixture to an electric field (pulse).

[0916] 5. Return cell/DNA mixture to ice and incubate for 5 minutes.

[0917] 6. Plate cells in non-selective medium. Biochemical selection may be carried out 24-48 hours later.

[0918] Lipofectamine

[0919] In vitro cell transfections can be done in 12-well plates, using 3.0 g plasmid DNA and Lipofectamine (GIBCO BRL), at 37° C. for 4 hours. After transfection, the cells are cultured in 2.0 ml complete medium for 48 hours and the cells are harvested. The cells are then washed in PBS. Stably transfected Chinese hamster ovary (CHO) and B16 lines are isolated by selection in 1.0 mg/ml G418 (GIBCO BRL). Cells are grown and passaged in medium containing G418 for 3-4 weeks Mock transfected cell lines (cells transfected with vector only) are used as controls.

[0920] Viral Vectors

[0921] Recombinant viral vectors containing the nucleic acid of interest can also be used to introduce nucleic acid into a cell ex vivo or in vitro. It is noted that viral vectors are also used to transfect cells in vivo. These viral vectors can be DNA viruses such as herpes viruses, adenoviruses, and vaccinia viruses or RNA viruses such as retroviruses. The method and materials required to produce and use these viral vectors ex vivo, in vitro, and in vivo are commonly known in the art and are used in the invention described herein (Sambrook, J. et al., supra).

[0922] Selection

[0923] Regardless of the method used to transfect a particular cell type, stably transfected cells are identified as follows. The DNA of interest contains a selectable marker. Typically, a selectable marker encodes a polypeptide that confers drug resistance and the DNA containing this resistance conferring nucleic acid is transfected into the recipient cell. Post transfection, the treated cells are allowed to grow for a period of time (24-48) hours to allow for efficient expression of the selectable marker. After an appropriate incubation time, transfected cells are treated with media containing the concentration of drug appropriate for the selective survival and expansion of the transfected and now drug resistant cells.

[0924] Many drug as well as non-drug selection methods are known in the art and can be used in the invention described herein. For example, a detailed description of currently available drug selection strategies is provided in Kriegler M., Gene Transfer and Expression, A Laboratory Manual, W. H. Freeman and Co. New York, N.Y. pp.103-107 (1991).

[0925] General Method

[0926] Sixteen hours after transfection, the transfected/infected cells are fed with fresh, non-selective media. Twenty-four to forty-eight hours later, the cultures are split to a 1:5 or greater dilution and plated in drug-containing media. It is noted that cells are not placed in drug-containing media immediately after transfection in order to allow a sufficient amount of time for the drug resistance nucleic acid to be expressed and thus confer the drug resistant phenotype. Cell cultures are re-fed with drug-containing media every three days, at which time cultures are examined under a microscope to determine the efficiency of drug selection.

[0927] Site-Directed Mutagenesis by Polymerase Chain Reaction: Introduction of Restriction Endonuclease Sites by PCR

[0928] PCR is the preferred method for introducing any desired sequence change into the DNA. The basic protocol is shown below. Material used are:

| | |
|---|---|
| DNA sample to be mutagenized, | Mineral oil |
| pUC19 plasmid b vector or | |
| similar high-copy number | |
| plasmid having M13 flanking | |
| primer 500 ng/ml (100 pM/ml) | |
| flanking sequence primers | |
| incorporating the restriction | |
| enzyme site | |
| TE buffer | Chloroform |
| 10× amplification buffer | Buffered phenol |
| 2 mM 4dNTP mix | 100% ethanol |
| 500 ng/ml (100 pM/ml) M13 | Appropriate restriction |
| flanking sequence primers: | endonucleases |
| forward | |
| (NEB) and reverse (NEB) | |
| 5 U/ml Taq DNA polymerase | 500 ml microcentrifuge |
| | tube |

[0929] The process steps are as follows:

[0930] 1. Subclone DNA to be mutagenized into high-copy number vector using restriction sites flanking the area to be mutated.

[0931] 2. Prepare template DNA by plasmid miniprep. Resuspend 100 ng in TE buffer to 1 ng/ml final.

[0932] 3. Synthesize oligonucleotide primers and purify by denaturing polyacrylamide gel electrophoresis. Resuspend oligonucleotides in 500 l TE buffer. Determine absorbance at A₂₆₀ and adjust to 500 ng/ml.

[0933] 4. Combine the following in each of two 500 1 microcentrifuge tubes, adding oligonucleotides 1 and 2 to separate tubes:

[0934] 10 ml (10 ng) template DNA

[0935] 10 ml 10× amplification buffer

[0936] 10 ml 2 mM 4dNTP mix

[0937] 1 ml (500 ng) oligonucleotide 1 or 2 (100 pM final)

[0938] 1 ml (500 ng) appropriate M 13 flanking sequence primer, forward or reverse (100 pM final).

[0939] H₂O to 99.5 ml

[0940] 0.5 ml Taq DNA polymerase (5 U/ml)

[0941] Overlay reaction with 100 ml mineral oil.

[0942] 5. Carry out PCR in an automated thermal cycler for 20 to 25 cycles under the following conditions: 45 sec—93° C.; 2 min—50° C.; 2 min—72° C. After last cycle, extend for an additional 10 min at 72° C.

[0943] 6. Analyze 4 l by nondenaturing agarose or occurrence gel electrophoresis to verify that the amplification has yielded the predicted product.

[0944] 7. Remove mineral oil and extract once with chloroform to remove remaining oil. Extract with buffered phenol and concentrate by precipitation with 100% ethanol.

[0945] 8. Digest half the amplified DNA with the restriction endonucleases for the flanking and introduced sites. Purify digested fragments on a low gelling/melting agarose gel.

[0946] 9. Ligate and subclone both fragments into an appropriately digested vector to obtain a recombinant plasmid containing a single DNA fragment incorporating the new restriction site.

[0947] 10. Transform plasmid into E. coli. Prepare DNA by plasmid miniprep.

[0948] 11. Analyze amplified fragment portion of plasmid by DNA sequencing to confirm the addition of the mutation.

[0949] Introduction of Point Mutation by PCR

[0950] Materials

[0951] DNA sample to be mutagenized

[0952] Oligonucleotide primers incorporating the point mutation

[0953] Klenow fragment of E. coli DNA polymerase I

[0954] Appropriate restriction endonuclease

[0955] Procedural Steps:

[0956] 1. Prepare template DNA (steps 1 and 2 of Basic Protocol).

[0957] 2. Synthesize and purify oligonucleotide primers (3 and 4).

[0958] 3. Amplify template DNA (steps 4 and 5 of Basic Protocol 1). After final extension step, add 5 U Klenow fragment and incubate 15 min at 30° C.).

[0959] 4. Analyze and process reaction (steps 6 and 7 of Basic Protocol).

[0960] 5. Digest half the amplified fragments with the restriction endonucleases for the flanking sequences. Purify digested fragments on a low gelling/melting agarose gel.

[0961] 6. Subclone the two amplified fragments into an appropriately digested vector by blunt-end ligation.

[0962] 7. Carry out steps 10 and 11 of Basic Protocol.

[0963] Introduction of a Point Mutation by Sequential PCR

[0964] Procedural Steps:

[0965] 1. Prepare the template DNA (steps 1 and 2 of Basic Protocol 1).

[0966] 2. Synthesize and purify the oligosaccharide primers (5 and 6).

[0967] 3. Amplify the template and generate blunt-end fragments (step 3 of Basic Protocol).

[0968] 4. Purify fragments by nondenaturing agarose gel electrophoresis. Resuspend in TE buffer at 1 ng/ml.

[0969] 5. Combine the following in 500 ml microcentrifuge tube and overlay with 100 ml mineral oil:

[0970] 10 ml (10 ng) each amplified fragment

[0971] 1 ml (500 ng) each flanking sequence primer (each 100 pM final)

[0972] 10 ml 10× amplification buffer

[0973] 10 ml 2 mM 4dNTP mix

[0974] 0.5 ml Taq DNA polymerase (5 U/ml)

[0975] 6. Carry out PCR for 20 to 25 cycles (step 5 of Basic Protocol 1). Analyze and process the reaction mix (steps 6 and 7 of Basic Protocol 1).

[0976] 7. Digest cDNA fragment with appropriate restriction endonuclease for the flanking sites. Purify fragment on a low gelling/melting agarose gel. Subclone into an appropriately digested vector.

[0977] 8. Carry out steps 10 and 11, Basic Protocol 1.

[0978] Genomic Targeting and Genetic Conversion in Cancer Therapy

[0979] A number of cellular transformations are due, in large part, to a single base mutation that alters the function of the expressed protein. Alterations in the DNA sequence of a gene involved in cell proliferation can have a significant effect on the viability of particular cells. Thus, the capacity to modulate the base sequence of such a gene would be a useful tool for cancer therapeutics. An experimental strategy that centers around site-specific DNA base mutation or correction using a unique chimeric oligonucleotide has been developed. This chimeric molecule has demonstrated higher recombinogenic activities than identical oligonucleotides containing only DNA residues, both in vitro and in vivo. The chimeric molecule is designed to hybridize to a target site within the genome and induce a single base mismatch at the residue targeted for mutation. The DNA structure created at this site is recognized by the host cell's repair system which mediates the correction reaction. For example, the bcr-abl fusion gene, the product of a translocation between human chromosomes 9 and 22, and the cause of chronic myelogenous leukemia (CML) can be targeted for gene correction. Fusion genes or mutations which abound in cancer cells are excellent targets for correction especially if (1) they are unique and are recognized by the immune system as dominant or subdominant epitopes, (2) they are a single copy target; (3) the DNA sequence of the fusion gene or mutation is unique. The goal of such experiments is to knock-out the fusion gene by changing an amino acid codon into a stop codon through a chimeric directed DNA repair system.

[0980] Targeted Gene Correction of Episomal DNA in Mammalian Cells Mediated by a Chimeric RNA/DNA Oligonucleotide

[0981] An experimental strategy to facilitate correction of single-base mutations of episomal targets in mammalian cells has been developed. The method utilizes a chimeric oligonucleotide composed of a contiguous stretch of RNA and DNA residues in a duplex conformation with double hairpin caps on the ends. The RNA/DNA sequence is designed to align with the sequence of the mutant locus and to contain the desired nucleotide change. Activity of the chimeric molecule in targeted correction is used in a with the aim of correcting a point mutation in the gene encoding the human liver/bone/kidney alkaline phosphatase. When the chimeric molecule is introduced into cells containing the mutant gene on an extrachromosomal plasmid, correction of the point mutation is accomplished with a frequency approaching 30%. These results extend the usefulness of the oligonucleotide-based gene targeting approaches by increasing specific targeting frequency.

[0982] The site directed mutagenesis is used to carry out using the chimeric DNA/RNA structure which enables the construct to target tumor cells in vivo and in vitro. Such targeting structures include target seeking moieties and can in principle be any structure that is able to bind to a cell surface structure or that binds via biospecific affinity. The target seeking moiety is primarily a disease specific structure selected among hormones, antibodies, growth factors. The biospecific affinity counterpart may include interleukins (especially interleukin-2) antibodies (full length antibody, Fab, F(ab)′₂, Fv, single chain antibody and any other antigen binding antibody fragments (such as Fab) directed to a cells surface epitope or more preferably towards the binding epitope for the a specific antibody. They may also include polypeptides binding to the constant domains of immunoglobulins (e.g., protein A and G and L), lectins, streptavidin, biotin etc.

[0983] The term antibodies comprises monoclonal as well as polyclonal preparations. The targeting moiety may also be directed toward unique structures on more or less healthy cells that regulate or control the development of a disease or ligands for specific receptors on tumor cells). The targeting structure may be a nucleic acid, lipid or carbohydrate and variations thereof which target receptors on the diseased cell. The targeting is not confined to diseased cells but may include additional normal cells as well.

[0984] Synthesis and Purification of Oligonucleotides.

[0985] The chimeric oligonucleotides are synthesized on a 0.2-mol scale by using the 1000 Å-wide-pore CPG on the ABI 394 DNA/RNA synthesizer. The exocyclic amine groups of DNA phosphoramidites (Applied Biosystems) are protected with benzoyl for adenosine and cytidine and isobutyryl for guanosine. The 2′-O-methyl RNA phosphoramidites (Glen Research, Sterling, Va.) are protected with a phenoxyacetyl group for adenosine, dimethylformamide for guanosine and an isobutyryl group for cytidine. After the synthesis is complete, the base-protecting groups are removed by heating in ethanol/concentrated ammonium hydroxide, 1:3 (vol/vol), for 20 h at 55° C. The crude oligonucleotides are purified by polyacrylamide gel electrophoresis. The entire oligonucleotide sample is mixed with 7 M urea/10% (vol/vol) glycerol. heated to 70° C., and loaded on a 10% polyacrylamide gel containing 7 M urea. After gel electrophoresis, DNA is visualized by UV shadowing, dissected from the gel, crushed, and eluted overnight in TE buffer (10 mM Tris-HCl/1 mM EDTA, pH 7.5) with shaking. The eluent containing gel pieces are centrifuged through 0.45-um (pore size) spin filter (Millipore) and precipitated with ethanol. Samples are further desalted with a G-25 spin column (Boerhinger Mannheim) and greater than 95% of the purified oligonucleotides are found to be full length.

[0986] Transient Transfection and Measurements of Activity

[0987] CHO cells were maintained in Dulbecco's modified Eagle's medium (DMEM) (BRL) containing 10% (vol/vol) fetal bovine serum (FBS; BRL). Transient transfection is carried out by addition of 10 g of the plasmid with 10 g of Lipofectin in 1 ml of Optimem (BRL) to 2×10⁵CHO cells in a 6-well plate. After 6 h. various amounts of oligonucleotide is mixed with 10 g of Lipofectin in 1 ml of Optimem and added to each well. After 18 h, the medium is aspirated and 2 ml of DMEM containing 10% FBS was added to each well. Histochemical staining was carried out (19), 24 h after transfection of the oligonucleotide. Spectrophotometric measurements are carried out by the ELISA amplification system (BRL). Transfection is carried out in triplicate in a 96-well plate. The amounts of reagents and cells are 10% of that used for the 6-well plate. Cells were washed three times with 0.15M NaCl and lysed in 100 ml of buffer containing 10 mM NaCl, 0.5 Nonidet P-40, 3 mM MgCl2, and 10 mM Tris-HCl (pH 7.5), 24 h after transfection with chimeric oligonucleotides. A fraction of cell lysates (20 ml) incubated with 50 l of ELISA substrate and 50 ml of ELISA amplifier (BRL), the reaction is stopped by addition of 50 ml of 0.3 M H2S04 after 5 min of incubation with amplifier. The extent of reaction is carried out within the linear range of the detection method. The absorbance is read by an ELISA plate reader (BRL) at a wavelength of 490 nm.

[0988] Hirt DNA Isolation, Colony Hybridization, and Direct DNA Sequencing of PCR Fragments

[0989] The cells are harvested for vector DNA isolation by a modified alkaline lysis procedure, 24 h after transfection with the chimeric oligonucleotide. Hirt DNA is transformed into Escherichia coli DH5a cells (BRL). Colonies from Hirt DNA are screened for specific hybridization for each probe designed to distinguish the point mutation. Colonies were grown on ampicillin plates, lifted onto nitrocellulose filter paper in duplicates, and processed for colony hybridization. The blots were hybridized to ³²P-end-labeled oligonucleotide probes at 37° C. in a solution containing 5× Denhardt's solution, 1% SDS, 2×SSC, and denatured salmon sperm DNA (100 mg/ml). Blots were washed at 52° C. in TMAC solution (3.0 M teramethylammonium chloride/50 mM Tris-HCl, pH 8.0/2 mM EDTA/0.1% SDS). Plasmid DNA was made from 20 colonies shown to hybridize to either of the probes by using the Qiagen miniprep kit (Chatsworth. Calif.). Several hundred bases flanking key positions of each plasmid are sequenced in both directions by automatic sequencing (ABI 373A, Applied Biosystems). A 192-bp PCR-amplified fragment are generated by Vent polymerase (New England Biolabs. Mass.), utilizing primers corresponding to positions of the known cDNA flanking position. The fragment is gel-purified and subjected to automatic DNA sequencing (ABI 373A, Applied Biosystems).

[0990] Oligonucleotide Synthesis

[0991] Chimeric RNA/DNA oligonucleotides for both transcribed and nontranscribed factor IX were synthesized by Applied Biosystems, Inc. (Foster City, Calif.) as previously described. The oligonucleotides are prepared with DNA and 2-O-methyl RNA phosphoramidite nucleoside monomers on an ABI 394 DNA/RNA synthesizer, purified by HPLC and quantified by UV absorbance. More than 95% of the purified oligonucleotides are determined to be full length.

[0992] Cell Isolation and Transfections

[0993] Cells are isolated, by a two-step collagenase perfusion as previously described. The purified cells are plated on Primaria plates (Becton Dickinson, Franklin Lakes, N.J.) at a density of 4×10⁶ cells per 35-mm dish and maintained in supplemented William's E medium. Eighteen hours after plating, the cells are washed and transfected with the chimeric molecules complexed to polyethylenimine (PEI). A pH 7.0, 10 mM stock solution of PEI (800 kDa) (Fluka Chemical Corp., Ronkonkoma, N.Y.) is prepared. Briefly, the chimeric oligonucleotides are complexed with 10 mM PEI at 9 equivalents of PEI nitrogen per chimeric phosphate in 100 l of 0.15 M NaCl and transfected in 1 ml of medium at final concentrations of 150, 300 or 450 nM. PEI is lactosylated by coupling lactose to 30% of the nitrogen amines using sodium cyanoborohydride (Sigma Chemical Company, St. Louis, Mo.). Cells are also transfected 1 with 100 l of 0.15 M NaCl containing the lactosylated 800-kDa and 25-kDa PEI chimeric complexes (Sigma) at final concentrations of 90, 180 or 270 nM. After 18 h, an additional 2 ml of medium is added to the transfected cultures for the remaining 6 or 30 h of incubation. Vehicle control transfections utilize the same amount of PEI, but substituted an equal volume of 10 mM Tris-HCl, pH 7.6, for the oligonucleotides.

[0994] DNA/RNA Isolation and Cloning

[0995] The cells were harvested by scraping 48 h after transfection. Genomic DNA larger than 100-150 base pairs was isolated using the highly pure PCR template preparation kit (Boehringer Mannheim, Indianapolis, Ind.). RNA was isolated using RNAzoI 8 (Tel-Test, Inc., Friendswood, Tex.), according to the manufacturer's protocol. PCR amplification of a fragment of the gene in question gene is performed with 300 ng of the isolated DNA from either the primary cell culture.

[0996] The primers were designed (Oligos Etc., Wilsonville, Oreg.) corresponding to nucleotides to cDNA to be corrected. Primer annealing is carried out at 59° C., and the samples are amplified for 30 cycles using Expand Hi-fidelity polymerase (Boehringer Mannheim). To rule out PCR artifacts, 300 ng of control DNA is incubated with 0.5, 1.0 and 1.5 g of the oligonucleotide before the PCR-amplification reaction. Additionally, 1.0 g of the chimeric alone is used as the “template” for the PCR amplification.

[0997] RT-PCR amplification is done utilizing the Titian one tube RT-PCR system (Boehringer Mannheim) according to the manufacturer's protocol and by using the same primers as those used for the DNA PCR amplification. To rule out DNA contamination, the RNA samples are treated with RQ1 DNase-free RNase (Promega Corp., Madison, Wis.) and RT-PCR negative controls of RNased RNA samples were performed in parallel with the RT-PCR reaction. Each of the PCR reactions is ligated into the TA cloning vector pCR 2.1 (Invitrogen, San Diego, Calif.) and transformed into frozen competent E. coli.

[0998] Nuclear Uptake of the Chimeric Molecules

[0999] Nuclear localization of fluorescently labeled chimeric oligonucleotides was determined in the isolated cells. For in vivo studies, 250 l saline containing 75 g of fluorescently labeled chimeric oligonucleotides complexed to PEI is injected directly into the exposed caudate lobe. The animals are killed 24 h post injection, the tumor targeted is removed, bisected longitudinally, embedded using OCT and frozen cryosections were cut ˜10 pm thick, fixed, processed and examined using a MRC1000 confocal microscope (Bio-Rad, Inc., Hercules, Calif.).

[1000] In vivo Delivery of the Chimeric Oligonucleotides

[1001] Vehicle controls and lactosylated 25-kDa PEI at a ratio of 6 equivalents of PEI nitrogen per chimeric phosphate are prepared in 300 l of 5% dextrose. The aliquots are administered either as a single dose of 100 g or divided doses of 150 g and 200 g on consecutive days. Five days post injection, tumor tissue is removed for DNA and RNA isolation. DNA is isolated. RNA is isolated for RT-PCR amplification of the same region as the genomic DNA using RNAexol and RNAmate (Intermountain Scientific Corp., Kaysville, Utah) according to the manufacturer's protocol.

[1002] Colony Hybridization and Sequencing

[1003] Eighteen to 20 h after plating, the colonies were lifted onto MSI MagnaGraph nylon filters (Micron Separations, Inc., Westboro, Mass.), replicated and processed for hybridization according to the manufacturer's recommendation. The filters were hybridized for 24 h with 32P-end-labeled oligonucleotide probes (Life Technologies, Inc., Gaithersburg, Md.), where the underlined nucleotide is the target of mutagenesis. Hybridizations are performed at 37° C., and the filters are processed following hybridization for autoradiography. Plasmid DNA isolated from colonies identified as hybridizing with the 32P-labeled probes is subjected to automatic sequencing using the forward and reverse primers, as well as gene specific primer corresponding to nucleotides of the normal gene.

### EXAMPLE 2

### Cells Transfected with Nucleic Acids Encoding SAgs

[1004] Cultured VX-2 carcinoma cells were shown to retain their tumorigenic activity after implantation into New Zealand white rabbits. Progressive tumor outgrowth was observed over a 3 week period. Nucleic acid encoding SEB isolated and characterized by Gaskill et al, J. Biol. Chem. 263:6276 (1988) and Ranelli et al., Proc. Natl Acad. Sci. USA 82:5850 (1985) were used to transfect tissue cultured VX-2 carcinoma cells using transfection methodology described in Example 1. Transfectants were selected using Q418 and the survival of SEB-transfected VX-2 carcinoma cells was observed. In additional experiments, attempts were made to transfect murine 205 and 207 tumor cells with nucleic acid encoding SEB(the kind gift from Dr. Saleem Khan) and Streptococcal pyrogenic exotoxin A (the kind gift of Dr. Joseph Ferretti). Successful transfection of murine MCA 205 and B16 cells by nucleic acids encoding SEA and SEC2 was achieved shortly thereafter by integrating the SAg DNA into several retroviral vectors (MFG NEO) containing a growth hormone leader sequence under the control of a chick β-actin promoter (Krause J C et al., J. Hematotherapy 6: 41-51 (1997)). In addition, murine tumors MCA 205 fibrosarcoma cells and a spontaneous mammary carcinoma cells were successfully transfected with nucleic acids encoding SEB (provided by Dr. Saleem Khan) using the β-actin promoter. Transfected mammary carcinoma cells induced T cell proliferation in vitro. To demonstrate the anti-tumor capacity of tumor cells transfected with nucleic acid encoding a SAg, these transfectants were injected i.p. into syngeneic hosts with established mammary carcinomas. These transfectants demonstrated a capacity to reduce micrometastases of wild type mammary tumor in vivo assessed in a clonogenic lung metastases assay. The anti-tumor effect produced by the SEB transfectants was enhanced significantly by the co-administration of tumor cells transfected with nucleic acids encoding the costimulating molecule B7-1.

### EXAMPLE 3

### Naked SAg DNA and Cells Co-transfected with SAg DNA and with Additional Nucleic Acid Encoding Anti-Tumor Motifs or Products

[1005] Nucleic acids encoding a SAg are injected in naked or plasmid form into a host with cancer as a means of activating T cells and initiating an anti-tumor response. They may also be used as a vaccine to prevent the occurrence or recurrence of tumor in a host. Under circumstances where it is desirable to activate CD4 cells to produce a TH-1 cytokine response the nucleic acid construct used to transfect cells contains immunostimulatory sequences such as unmethylated CpG sequences. Nucleic acids encoding SAgs may be co transfected into tumor cells together with nucleic acid encoding other constituents capable of promoting an anti-tumor response. A list of possible components of nucleic acid constructs for direct administration and/or transfection of tumor cells which are administered to the host is presented in Table 2.

[1006] The nucleic acid construct or constructs are administered to a host intramuscularly, intradermally, systemically, parenterally, intratumorally, orally or locally (in the vicinity of the tumor). Alternatively, the construct is administered via a catheter or other devices known in the art into the tumor vasculature supplying all or part of a tumor. When the construct is injected systemically, the nucleic acid construct is directed to the tumor using an anti-tumor antibody or ligand specific for a tumor receptor or receptor on the tumor neovasculature or stroma. The antibody or ligand or other targeting structures are conjugated to the SAg nucleic acid construct in order to facilitate the introduction of the construct into tumor cells. Nucleic acid/polypeptide complexes or nucleic acid/viral complexes are used to target a specific receptor on the tumor vasculature or stroma.

[1007] Chemical Conjugation of SAg Nucleic Acids to VTs, Apolipoproteins, HPV Epitopes or Other Polypeptides/Proteins Listed in Tables I and II.

[1008] The following section describes actual physical conjugates between poly- or oligonucleotides and peptides or proteins. SAg nucleic acid conjugates are prepared by chemical modification of nucleic acids at specific sites within individual nucleotides or within oligonucleotides such that a protein can be bound to a DNA or RNA polymer.

[1009] Derivatization may be accomplished through discrete sites on the available bases, sugars, or phosphate groups to create primary amines, sulfhydryls, carboxylates or phenolates. The chemical modification of nucleic acids can encompass several strategies. The initial derivatization may be the addition of a spacer arm to a particular reactive group on the nucleotide structure. Such a spacer typically contains a terminal functional group, such as an amine, that can be used to couple another molecule. The spacer may be used to react with a cross-linking agent, such as a heterobifunctional compound that can facilitate the conjugation of a protein or another molecule to the modified nucleotide.

TABLE II
NUCLEIC ACID CONSTRUCTS AND CELLS
SAg-encoding DNA is used alone or together with DNA encoding other cell surface moieties useful in
generating antitumor immunity. Genes or their products are shown in column 1, source information is shown
in column 3, preferred cells to be transformed, transfected or transduced with the DNA are shown in column
2. All of references are incorporated by reference in their entirety.

| Gene or Gene Product | | Cells transformed | Reference or Source |
|---|---|---|---|
| 1. | SAg | Tumor | [See Text] |
| 2. | Enterotoxin | Tumor | [See Text] |
| 3. | SAg receptor | Tumor | [See Text] |
| 4. | Enterotoxin receptor | Tumor | [See Text] |
| 5. | CD1 receptor(s) | Tumor | Martin L H et al., Proc Natl. Acad. Sci. |
| | | | 83: 9154-9158 (1986) |
| 6. | CD14 receptor | Tumor | Ferrero, E et al., J. Immunol. 145: 331-336 |
| | | | (1990) |
| 7. | CD44 encoding nucleic acids | T or NKT | Nottenburg, C et al. Proc. Natl. Acad. Sci. |
| | | | 66: 8521-8525 (1992) |
| 8. | Carbohydrate modifying enzymes | Tumor, T or NKT | Sheng, Y et al. Int. J. Cancer 73: 850-858 |
| | | | (1997) |
| 9. | TCR V chain | Tumor | Tillinghast, JP et al., Science 233: 879-883 |
| | | | (1986) |
| 10. | Staph/Strep hyaluronidase | Tumor | Hynes W L et al., Infect. Immun., 63: 3015- |
| | | | 3020 (1995) |
| 11. | Staph/Strep erythrogenic toxin | Tumor | McShan W M, et al., Adv. Exp. Med. Biol. |
| | | | 418: 971-973 (1997) |
| 12. | Staphylococcal β -hemolysin | Tumor | Projan S J et al., Nucleic Acid Res. 3305- |
| | | | 3309 (1989) |
| 13. | Strep capsular polysaccharide | Tumor | Lin, WS et al., J. Bacteriol. 176: 7005-7016 |
| | | | (1994) |
| 14. | Staph staphylocoagulase | Tumor | Kaida S. et al., J. Biochemistry 102: 1177- |
| | | | 1186 (1987) |
| 15. | Staph Protein A | Tumor | Shuttleworth, H L et al., Gene 58: 283-295 |
| | | | (1987) |
| 16. | Staph Protein A domain D | Tumor | Roben, P W et al., J. Immunol. 154: 6347- |
| | | | 6445 (1995) |
| 17. | Staph Protein A Domain B | Tumor | Gouda, H et al., Biochemistry, 31: 9665- |
| | | | 9672 (1992) |
| 18. | Immunostimulatory protein | Tumor, T or NKT | Tokunaga, T et al., Microbiol. Immunol. 36: |
| | | | 55-66, (1992) |
| 19. | Costimulatory protein | Tumor | Entage, PC et al., J. Immunol. 160: 2531- |
| | | | 2538 (1998) |
| 20. | SAg-mimicking nucleic acid | T or NKT | |
| 21. | Glycophorin | Tumor | Siebert, P D. et al., Proc. Natl. Acad. Sci. |
| | | | USA 83 1665-1669 (1986) |
| 22. | Mannose receptor | Tumor | Kim S J. et al., Genomics 14: 721-727 (1992) |
| 23. | Angiostatin | Tumor | Cao, Y. et al., J. Clin. Invest 101: 1055-1063 |
| | | | (1998) |
| 24. | Chemoattractant | Tumor | Ames, R S. et al., J. Biol. Chem. 271: 20231- |
| | | | 20234 (1996) |
| 25. | Chemokine | Tumor | Nagira, M et al., J. Biol. Chem. 272: 19518- |
| | | | 19524 (1997) |
| 26. | Transcription factor | Tumor, T or NKT | Schwab M et al., Mol. Cell Biol. 6: 2752-2758 |
| | | | (1986) |
| 27. | Transcription factor-binding | Tumor, T or NKT | |
| | nucleic acid | | |
| 28. | SAg/peptide conjugate | Tumor | |
| 29. | Glyco-SAg | Tumor | |
| 30. | Staph. Global regulator gene agr | Tumor | Balaban, N. et al., Proc. Natl. Acad. Sci. |
| | | | USA 92: 1619-1623 (1995) |
| 31. | Lipid A biosynthetic genes IpxA- | Tumor | Schnaitman C A et al., Microbiological |
| | D | | Reviews 57: 655-682 (1993) |
| 32. | Mycobacterial mycolic acid | Tumor | Fernandes N D et al., Gene 170: 95-99 |
| | | | (1996); Mathur M et al., J. Biol. Chem. |
| | | | 267: 19388-19395 (1992) |
| 33. | c-abl oncogene amplified in | Tumor | Scherle P A et al., Proc. Natl. Acad. Sci. USA |
| | chronic myel. Leukemia | | 87: 1908 (1990); Heisterkamp N et. al., |
| | | | Nature 344: 251-253 (1990) |
| 34. | erbB2 (HER2/neu) oncogene | Tumor | Schechter A L et al., Science 229: 976 |
| | | | (1985); Bargmann C L Nature 319: 22 (1986); |
| | | | Hung M C et al., Proc. Natl. Acad Sci. 83: |
| | | | 261 (1986); Yamamoto T et al., Nature 319: |
| | | | 230 (1986) |
| 35. | IGF-1 receptor gene | Tumor | Abbott A M et al., J. Biol. Chem. 267: 10759- |
| | | | 10763 (1992); Scott J et al., Nature 317: |
| | | | 260-262 (1985); Liu J et al., Cell 75: 59-63 |
| | | | (1993) |
| 36. | VEGF | Tumor | Tischer E et al., J. Biol. Chem. 266: 11947- |
| | | | 11954 (1991) |
| 37. | Strep emm-like gene family | Tumor | Kehoe M A, In: Cell-Wall Associated |
| | | | Proteins in Gram-Positive Bacteria in |
| | | | Bacterial Cell Wall, Ghuysen J M et al., eds, |
| | | | Elsevier, Amsterdam, 1994 |
| 38. | iNOS | Tumor | Xie Q W et al., Science 256: 225-228 (1992) |
| 39. | Apolipoproteins (e.g., Lp(a), | Tumor | [See Text] |
| | apoB-100, apoB-48, apoE) | | |
| 40. | LDL & oxyLDL receptors (e.g., | Tumor | [See Text] |
| | LDL oxyLDL, acetyl-LDL, VLDL, | | |
| | LRP, CD36, SREC, LOX-1 | | |
| | macrophage scavenger | | |
| | receptors) | | |
| 41. | Chemokine receptor | Tumor/Accessory cells | [See Text] |

[1010] If enzymatic methods are used to incorporate a small spacer into an oligonucleotide, subsequent chemical conjugation steps still are needed to add the protein moiety. In some cases, if an oligonucleotide contains the appropriate functional group, a protein may be directly coupled using chemical methods. Many of the chemical derivatization methods employed in these strategies involve the use of an activation step that produces a reactive intermediary. The activated species then can be used to couple a molecule containing a nucleophile, typically a primary amine.

[1011] A preferred method is to amidate the 5′ PO4 of the oligonucleotide with EDC and then couple cystamine to the 5′ amidated oligonucleotide. EDC will add an amide to the oligonucleotide to form a phosphoramidate linkage. After the addition of cystamine the disulfide is reduced with an agent such as dithiothreitol (DTT) to produce a free 5′ sulfhydryl. The derivatized oligonucleotide is then coupled to a protein chain (e.g., a verotoxin A or B chain) that has been activated with a heterobifunctional cross-linker such as succinimidyl 4(N-maleimidomethyl)cyclohexane 1-carboxylate (SMCC) which reacts with the amines on the protein which then react with the sulfhydryls on the derivatized oligonucleotide. N-succinimidyl S-actylthioacetate (SATA) is useful for adding a free thiol or sulfhydryl group to a molecule lacking this moiety. With this modification, “protected” sulfhydryl is formed which may be stored indefinitely in this protected state.

[1012] When needed, the acetyl group on the protected sulfhydryl is removed to reveal the sulfhydryl for conjugation to another molecule. A heterobifunctional agent such as SMCC or N-Succinimidyl 3-(2-pyridylthio)propionate (SPDP) may be directly added to the amidated oligonucleotide phosphate group to produce a free sulfhydryl unit for reactivity with the protein or peptide.

[1013] Chemical Conjugation of Polypeptides/Proteins to SAg DNA via Carbodiimide Reaction with the 5′-Phosphates (Phosphoramidate Formation)

[1014] The water-soluble carbodiimide EDC, rapidly reacts with a carboxylate or phosphate to form an active complex able to couple with a primary amine-containing compound. The carbodiimide activates an alkyl phosphate group to a highly reactive phosphodiester intermediate. Diamine spacer molecules or amine-containing peptides then may react with this active species to form a stable phosphoramidate bond. Alternatively, bis-hydrazide compounds may be coupled to DNA using this protocol to yield a terminal hydrazide functional group able to react with aldehyde-containing molecules (Ghosh et. al., 1989). These methods permit specific labeling of SAg DNA only at the 5′ end.

[1015] The following protocol describes the modification of SAg DNA or RNA oligonucleotides at their 5′-phosphate ends with a bis-hydrazide compound, such as adipic acid dihydrazide or carbohydrazide. A similar procedure for coupling the diamine compound cystamine is described below.

[1016] Protocol

[1017] 1. Weigh out 1.25 mg of the carbodiimide 1-ethyl-3-(3-dimethylamino-propyl)carbodiimide hydrochloride (EDC) into a microfuge tube.

[1018] 2. Add 7.5 ml of SAg RNA or DNA that has 5′ phosphate groups. The concentration of the oligonucleotide should be 7.5-15 nmol or a total of about 57-115.5 mg. Also immediately add 5 ml of 0.25 M bis-hydrazide compound dissolved in 0.1 M imidazole, pH 6.

[1019] 3. Mix (e.g., by vortexing) and centrifuge in a microfuge for 5 min at maximal rpm.

[1020] 4. Add an additional 20 ml of 0.1 M imidazole, pH 6. Mix and allow to react for 30 mm at room temperature.

[1021] 5. Purify the hydrazide-labeled oligonucleotide by gel filtration on Sephadex G-25 using 10 mM sodium phosphate, 0.15 M NaCl, 10 mM EDTA, pH 7.2. The oligonucleotide now may be conjugated with an aldehyde-containing molecule.

[1022] Sulfhydryl Modification of SAg DNA

[1023] Creating a sulfhydryl group on SAg DNA allows conjugation reactions to be done with sulfhydryl-reactive heterobifunctional cross-linkers providing increased control over the derivatization process. Proteins are activated with a cross-linking agent containing an amine-reactive and a sulfhydryl-reactive end, such as SPDP, leaving the sulfhydryl-reactive portion free to couple with the modified DNA molecule. Having a sulfhydryl group on the SAg DNA directs the coupling reaction to discrete sites on the nucleotide strand, thus better preserving hybridization ability in the final conjugate. In addition, heterobifunctional cross-linkers of this type allow two- or three-step conjugation procedures which result in better yield of the desired conjugate than do homobifunctional reagents.

[1024] Cystamine Modification of 5′ Phosphate Groups on Superantigen Nucleotides Using EDC

[1025] SAg DNA or RNA is modified with cystamine at the 5′ phosphate groups using the carbodiimide reaction described above. In some procedures, the reaction is carried out in a two-step process by first forming a reactive phosphorylimidazolide by EDC conjugation in an imidazole buffer. Next, cystamine is reacted with the activated oligonucleotide, causing the imidazole to be replaced by the amine and creating a phosphoramidate linkage. Reduction of the cystamine-labeled oligonucleotide using a disulfide reducing agent releases 2-mercaptoethylamine and creates a thiol group.

[1026] Protocol

[1027] 1. Weigh out 1.25 mg of the carbodiimide 1-ethyl-3-(3-dimethylamino-propyl)carbodiimide hydrochloride (EDC) into a microfuge tube.

[1028] 2. Add 7.5 ml of SAg RNA or DNA that has 5′ phosphate groups. The concentration of the oligonucleotide should be 7.5-15 nmol or a total of about 57-115.5 mg. Also immediately add 5 ml of 0.25 M cystamine in 0.1 M imidazole, pH 6.

[1029] 3. Mix (e.g., by vortexing) and centrifuge in a microfuge for 5 min at maximal rpm.

[1030] 4. Add an additional 20 ml of 0.1 M imidazole, pH 6. Mix and allow to react for 30 mm at room temperature.

[1031] 5. For reduction of the cystamine disulfides, add 20 ml of 1 M DTT and incubate at room temperature for 15 mm. This will release 2-mercaptoethylamine from the cystamine modification site and create the free sulfhydryl on the 5′ terminus of the oligonucleotide.

[1032] 6. Purify the SH-labeled oligo by gel filtration on Sephadex G-25 using 10 mM sodium phosphate, 0.15 M NaCl, 10 mM EDTA, pH 7.2. The oligonucleotide now may be used to conjugate with an activated protein containing a sulfhydryl-reactive group.

[1033] SPDP Modification of Amines on Superantigen Nucleotides

[1034] SAg DNA that has been modified with an amine-terminal spacer arm may be thiolated to contain a sulfhydryl residue. Theoretically, any amine-reactive thiolation reagent may be used to convert an amino group on a SAg DNA molecule into a thiol. A preferred reagent both for cross-linking and for thiolation reactions is the heterobifunctional reagent SPDP. The NHS ester end of SPDP reacts with primary amine groups to produce stable amide bonds. The other end of the cross-linker contains a thiol-reactive pyridyldisulfide group that also can be reduced with DTT to create a free sulfhydryl. The reaction of a 5′-diamine-modified SAg DNA oligonucleotide with SPDP proceeds under mildly alkaline conditions (optimal pH 7-9) yields the pyridyldisulfide-activated intermediate. This derivative can be used to couple directly with sulfhydryl-containing compounds, or it may be converted into a free sulfhydryl for coupling to thiol-reactive compounds. In an alternative approach, 2,2′-dipyridyldisulfide is used to create reactive pyridyldisulfide groups on a reduced 5′-cystamine-labeled SAg oligonucleotide. This derivative then can be used to couple with sulfhydryl-containing molecules, forming a disulfide bond. Reduction of the pyridyldisulfide end after SPDP modification releases the pyridine-2-thione leaving group and generates a terminal-SH group.

[1035] Protocol

[1036] 1. Dissolve the amine-modified SAg oligonucleotide to be thiolated in 250 ml of 50 mM sodium phosphate, pH 7.5.

[1037] 2. Dissolve SPDP at a concentration of 6.2 mg/ml in DMSO to make a 20 mM stock solution. Alternatively, LC-SPDP may be used and dissolved at a concentration of 8.5 mg/ml in DMSO (also makes a 20 mM solution). If the water-soluble Sulfo-LC-SPDP is used, a stock solution in water may be prepared just prior to addition of an aliquot to the thiolation reaction. In this case, prepare a 10 mM solution of Sulfo-LC-SPDP by dissolving 5.2 mg/ml in water. Since an aqueous solution of the cross-linker will degrade by hydrolysis of the sulfo-NHS ester, it should be used quickly.

[1038] 3. Add 50 ml of the SPDP (or LC-SPDP) solution to the SAg oligonucleotide solution. Add 100 ml of the Sulfo-LC-SPDP solution, if the water-soluble cross-linker is used. Mix.

[1039] 4. Allow to react for 1 h at room temperature.

[1040] 5. Remove excess reagents from the modified SAg oligonucleotide by gel filtration. The modified oligonucleotide now may be used to conjugate with a sulfhydryl-containing molecule, or it may be reduced to create a thiol for conjugation with sulfhydryl-reactive molecules.

[1041] 6. To release the pyridine-2-thione leaving group and form the free sulfhydryl, add 20 ml of 1M DTT and incubate at room temperature for 15 mm. If present in sufficient quantity, the release of pyridine-2-thione is followed by its characteristic absorbance at 343 nm (e=8.08×10³ M⁻¹ cm⁻¹). For many oligonucleotide modification applications, however, the leaving group will be present in too low a concentration to be detectable.

[1042] 7. Purify the thiolated oligonucleotide from excess DTT by dialysis or gel filtration using 50 mM sodium phosphate, 1 mM EDTA, pH 7.2. The modified oligonucleotide should be used immediately in a conjugation reaction to prevent sulfhydryl oxidation and formation of disulfide cross-links.

[1043] N-succinimidyl S-actylthioacetate (SATA ) Modification of Amines on Superantigen DNA Nucleotides

[1044] SAg oligonucleotides containing amine groups introduced by enzymatic or chemical means may be modified with SATA to produce protected sulfhydryl derivatives. The NHS (N-hydroxylsuccinimide) ester end of SATA reacts with a primary amine to form a stable amide bond. After modification, the acetyl protecting group can be removed as needed by treatment with hydroxylamine under mildly alkaline conditions. The result is terminal sulfhydryl groups that can be used for subsequent labeling with thiol-reactive probes or activated-protein derivatives.

[1045] Protocol

[1046] 1. Dissolve the amine-modified SAg oligonucleotide to be thiolated in 250 ml of 50 mM sodium phosphate, pH 8.

[1047] 2. Dissolve SATA in DMF at a concentration of 8 mg/ml.

[1048] 3. Add 250 ml of the SATA solution to the oligo solution. Mix.

[1049] 4. React for 3 h at 37° C.

[1050] 5. Remove excess reagents by gel filtration.

[1051] 6. To deprotect the thioacetyl group, add 100 ml of 50 mM hydroxylamine hydrochloride, 2.5 mM EDTA, pH 7.5, and react for 2 h.

[1052] 7. The sulfhydryl-containing oligonucleotide may be used immediately to conjugate with a sulfhydryl-reactive label, or it can be purified from excess hydroxylamine by gel filtration.

[1053] Conjugation of a Polypeptide to SAg DNA

[1054] As indicated, the DNA molecule must be modified to contain one or more suitable reactive groups, such as nucleophiles like amines or sulfhydryls. The modifications that employ enzymatic or chemical methods can result in random incorporation of modification sites or can be directed exclusively to one end of the DNA molecule, e.g., 5′ phosphate coupling.

[1055] Some of the more common procedures for preparing DNA-polypeptide conjugates are given below.

[1056] Polypeptide (e.g., VT) Conjugation to Cystamine-Modified SAg DNA using Amine- and Sulfhydryl-Reactive Heterobifunctional Cross-linkers

[1057] Cystamine groups are added to the 5′ phosphate of SAg DNA as described above. Once a sulfhydryl-modified DNA has been prepared, the following protocol may be used. The protein is activated with SPDP. Reacting the SAgic DNA probe in excess allows easy separation of uncoupled SAg oligonucleotide from conjugated molecules.

[1058] Protocol

[1059] 1. Dissolve a 5′-sulfhydryl-modified SAg oligonucleotide in water or 10 mM EDTA at a concentration of 0.05-25 mg/ml. Calculate the total nanomoles of oligonucleotide present based on its molecular weight.

[1060] 2. Add 0. 15M NaCl, 10 mM EDTA, pH 7.2. Add the oligonucleotide solution to the activated protein in a 10-fold molar excess.

[1061] 3. React at room temperature for 30 mm with gentle mixing.

[1062] 4. The protein-DNA conjugate is purified away from excess SAg oligonucleotide by dialysis or gel filtration, or through the use of centrifugal concentrators. Centricon-30 concentrators (Amicon) that have a molecular weight cutoff of 30,000 are also used to remove unreacted oligonucleotides. Since the polypeptide molecular weight is approximately 140,000 and the conjugate is even higher, a relatively small DNA oligomer will pass through the membranes of these units while the conjugate will not. To purify the prepared conjugate using Centricon-30s, add 2 ml of the phosphate buffer from step 2 to one concentrator unit, then add the reaction mixture to the buffer and mix. Centrifuge at 1000 g for 15 mm or until the retentate volume is about 50 ml. Add another 2 ml of buffer and centrifuge again until the retentate is 50 ml. Invert the Centricon-30 unit and centrifuge to collect the retentate in the collection tube provided by the manufacturer.

[1063] Administration of Peptide-DNA (pDNA), Naked DNA, or Protein or Peptide Conjugates

[1064] Naked DNA, pDNA, nucleic acid-peptide or -polypeptide conjugates or genetic fusion products are administered parenterally (for example, iv, ip, im, subcutaneously, intrathecally, intratumoral, rectally, transcutaneously) or orally. Administration may also be by a gene gun using a 1 ml syringe and a 28 gauge needle. The nucleic acid is administered intradermally or intramuscularly in a total volume of 100 ml. A Tyne applicator is used to deliver doses of 1-1000 mg of DNA at 3× weekly intervals. SAg-encoding nucleic acid is injected directly into the tumor. The nucleic acid either contains or does not contain immunostimulatory sequences that induce activation of T cells and skew the response toward production of TH1 cytokines. For example, if nucleic acids encoding a tumor associated antigen are used then the nucleic acids are engineered to incorporate ISS sequences in order to fully activate a TH1 response. Likewise, if nucleic acid encoding a tumor associated antigen is cotransfected with nucleic acid encoding a SAg, then one of the nucleic acid constructs is engineered to contain an ISS.

[1065] Viral DNA, nucleic acid expression cassettes or plasmids or bacteriophages encoding the constructs given in Table II may be used for in vivo immunization in place of naked DNA. Viruses may also acquire the αGal epitope after transfection into tumor cells which contain the α-galactosyltransferase enzyme either naturally or via transfection. The virus must possess the intact N-acetyllactosamine substrate for the galactosyl-transferase in order to express the αGal. The viruses shedding from these cells will express the αGal epitope. The virus also contains peptide sequences for SAg and tumor associated antigen acquired from the tumor cells which were previously transfected with nucleic acids encoding SAg and tumor antigen. The shed virus may also express staphylococcal or streptococcal hyaluronidase and capsular polysaccharide sequences obtained from host tumor cell or accessory cells previously transfected with nucleic acids encoding these genes. The shed virus expressing αGal, SAg, hyaluronidase and capsular polysaccharide is capable of initiating a potent tumoricidal response when administered to hosts with established tumors or when used as a tumor vaccine against potential tumors.

[1066] These constructs are also used as vaccines. Further, the nucleic acid construct is pre-processed ex vivo in muscle cells before selective delivery into host tumor tissue. Cationic liposomes or other liposomes or drug carriers well known in the art are used as vehicles to deliver the nucleic acids in vivo.

[1067] The transfection process is also carried out ex vivo. Nucleic acids encoding SAgs together with the nucleic acid constructs given in Table II are transfected into tumor cells of all types and antigen presenting cells such as MHC class I and class II as well as APCs expressing CD1 and mannose receptors. These include but are not limited to DCs, immunocytes, monocytes, macrophages, and fibroblasts. SAg is transfected alone or together with one or more of the above constructs given in Table II. The transfected cell expresses/secretes preferentially a SAg plus an immunogenic oncogene product, anti-angiogenesis factor, glycosylceramide, LPS or Gal. The transfectants present their gene products on cell surface receptors such as conventional MHC molecules for SAgs or in the case of the glycosylceramides or LPS on a CD-1 or mannose receptor. (APC). Glycosylated SAgs show preference for presentation on mannose receptors.

### EXAMPLE 4

### SAgs, Tumor Antigens, Glycosylceramides, LPS's, Binary and Ternary Complexes Applied to MHC Class I, Class II, CD1 or Mannose Receptors

[1068] The above molecules and all of the conjugates given in section 55 are applied to antigen presenting receptors as given below. CD1 represents a family of non-polymorphic antigen presenting molecules unlinked to the MHC molecules expressed by most professional APCs. The NKT cells that recognize CD1 presented antigens express NKR-P1, Ly49 receptors, an invariant chain and a V8.2 variable region. With respect to these receptors, they share identity and their natural ligands with NK cells. Specifically, CD1 binds peptides with extended NH2 and COOH termini flanking the core binding motif Long peptides (greater than 8 to 10 amino acids) with amino acid residues at their hydrophobic binding sites and greatly restricted anchors are preferred. This recognition of CD1-presented antigens depends on the type and distribution of sugar residues. Mycobacterial cell wall antigens namely mycolic acids and lipoarabinomannan also bind to CD1. Recently several glycosylceramides, in particular, monogalactosyl ceramides GalCer) were shown to bind to CD1 and to activate NKT cells Specifically, CD1 molecules are capable of presenting mannosides with 1,2 linkages and a phosphatidylinositol unit. CD1 bound antigens are recognized by NKT cells (/TCR positive; CD4 and CD8 negative). For instance, NKT cells are activated by a lipoarabimannan (LAM) presented on CD1 receptors and become cytolytic while producing abundant INF.

[1069] In the present invention, a SAg bound to a monogalactosylceramide such as GalCer is loaded onto CD1 or MHC class I or II receptors expressed by APCs. The CD1 or MHC receptors are in soluble or immobilized form produced by methods well described in the art. According to this invention, CD1 receptors present SAg polypeptides complexed with GalCer lipids or oligosaccharides to T cell and/or NKT cell population which recognize the conjugates and commence differentiation to tumor specific effector cells. These ligands are be loaded on the CD1 receptor sequentially, simultaneously or as a preformed conjugates. Alternatively, they are positioned on the CD1 receptor after internal processing of their nucleic acid counterparts in the antigen presenting cells. These cells are then harvested and used for adoptive immunotherapy (Examples 7, 15, 16. 18-23).

[1070] These complexes are also useful in vivo as a preventative or therapeutic antitumor vaccine (Example 14, 15, 16, 18-23).

[1071] SAgs and tumor associated antigen (TAA) are loaded sequentially on to class II receptors of antigen presenting cells. Alternatively, preformed complexes of tumor associated antigen and SAg are loaded onto MHC class II receptors. The SAg may be in the native or glycosylated form. The tumor associated antigen is also fused genetically to the b chain of the MHC class II receptor. A SAg is added once the TAA is expressed bound to the MHC class II. The sequence may also be reversed so that a SAg is genetically processed and bound to the b chain after which the TAA is added. Consensus or repeating nucleic acid sequences shared by a tumor associated antigen and a SAg are cloned into a single sequence and transfected into APCs which display the consensus peptide in the context of the class II receptor. Methodology for production of the fusion genes is well described in the art. (See Ausubel. F M et al., supra; Sambrook, J et al., supra) T cells or NKT cells are activated after exposure to SAg and TAA producing an expanded tumor specific T cell effector population which is useful in adoptive immunotherapy of cancer (Examples 7, 15. 16, 18-23).

[1072] Antigen presenting cells in this system are chosen from a group consisting of DCs, fibroblasts, macrophages, and lymphocytes, but other professional APCs or any other cell transfectants, phage displays or liposomes expressing the class I or class II receptors are also used. Alternatively, a tumor associated antigen is bound to an APC that is pharmacologically or genetically inhibited from antigen processing. SAg is added and the complex of SAg and protein bound to class II is then presented to a T cell population to produce a tumor specific effector cell population for use in adoptive immunotherapy of cancer as in Example 15, 16, 18-23). These complexes are also useful in vivo as a preventative or therapeutic antitumor vaccine (Example 14, 15, 16, 18-23).

[1073] Soluble SAg MHC class II proteins with covalently bound single peptides are produced using a baculovirus system to express in insect cells two murine class II molecules with peptides attached by a linker to the N terminus of their β-chains (Kozono H. et al., Nature 369: 151-154 (1994)). The resulting peptide is engaged by the peptide binding groove of the secreted MHC molecule and this complex is recognized by T cells bearing receptors specific for the combination. In this method, the approximately 100 bp fragment encoding the SAg and a flexible linker with an embedded thrombin cleavage site is introduced in frame by the PCR just after the third codon of the b1 domain. This assures a recognizable leader peptide cleavage site and flexible link between the C-terminus of the foreign peptide bound in the cleft of the MHC molecule and the N terminus of the b1 domain of SAg amino acids. Soluble complexes consisting of receptors and various SAg are prepared in this way and are used to activate T cells for use in adoptive immunotherapy. Similarly, preparations consisting of MHC class I receptors, CD1 or mannose receptors complexed with SAgs, glycosylceramides or LPS's are produced which are useful in activating T cells or NKT cells for adoptive immunotherapy of cancer in protocols given in Examples 7, 15, 16, 18-23). These complexes are also useful in vivo as a preventative or therapeutic antitumor vaccine (Example 14, 15, 16, 18-23).

[1074] To produce complexes composed of SAgs with class I or II MHC or soluble DR a or b (lacking the transmembrane domain) and TCR heterodimer, a soluble human TCR heterodimer which has specificity for various tumor associated antigens bound to the human class I or II MHC molecules or human soluble CD1 molecules is used. A typical system for preparing ternary SAg-tumor peptide-MHC or ternary CD1-glycosylceramide (preferably GalCer)-SAg complexes capable of triggering T cells or NKT cells is as follows. CD1, DR-1 or HLA-A2 restricted tumor antigen specific T cell or NKT cell clones are used although primary unsensitized T or NKT cells may be used as well. The DR-1 and HLA-A2 homozygous Epstein-Barr virus-transformed B cell line LG-2 or DCs expressing CD1 receptors are used as APCs either live or fixed in 0.5% paraformaldehyde for 20 minutes. LG-2 and DCs (2.67×10⁵ per ml) in RPMI 1640 with 1% fetal bovine serum are pulsed with tumor antigen and glycosylceramide respectively for 2 hours at 37° C. and then washed in RPMI 1640/1% fetal bovine serum to remove unbound antigen. SAg is added for 2 hours at 37° C. Pulsed APCs (4×10⁴ per well) are co cultured with resting T cells or NKT cells (2×10⁴ per well) in round-bottom microtiter plates in RPMI 1640/5% human serum. Twenty four hours later, the cells are harvested. The APCs are separated and the T cells or NKT cells may be optionally expanded further with IL.-2 Optionally, complexes comprising soluble recombinant DRα or β chain with bound superantigen are presented to the T cell or NKT cells which are then expanded with IL-2. These cells are then harvested and used for adoptive immunotherapy (Examples 7, 15, 16. 18-23). The APC containing the complexes are also useful in vivo as a preventative or therapeutic antitumor vaccine (Example 14, 15, 16, 18-23).

[1075] Also useful for tumor therapy are the complexes LIP⁺ GPI-SAg (from Section 38), either free or in the form of vesicles or exosomes comprising SAg-GalCer complexes or SAg-tumor peptide (including but not limited to normal mutated structures). The ternary complexes of SAg-GalCer-heat shock protein and tumor peptide-heat shock protein are also useful, These complexes may be in or soluble or immobilized form, attached to a CD1 or MHC or as part of a vesicle or exosome. the complexes are also useful in vivo as a preventative or therapeutic antitumor vaccine (Example 14, 15, 16, 18-23).

[1076] The tumor associated antigen or SAg-tumor associated antigen complex is conjugated to oxidized mannan (polymannose) by methods described by Apostolopoulos, V et al., Proc. Natl. Acad. Sci. USA 92: 10128-10132 (1995) which is then loaded onto mannose receptors of antigen presenting cells for stimulation of a T cell anti-tumor response. Alternatively, the SAg (optionally conjugated to tumor peptides)-mannan conjugate is administered to tumor bearing hosts by methods in Example 15, 16, 18-23).

[1077] The SAg alone or conjugated to a tumor associated antigen is recognized by the mannose receptor on macrophages. This requires a glycosylated SAg which is recognized by the mannose receptor on macrophages. A native or glycosylated tumor associated antigen-SAg conjugate or a consensus peptide of both polypeptides is presented to mannose receptors expressed on antigen presenting cells which are exposed to a T cell or NKT cell population to produce a tumor specific effector cells by methods in Example 15, 16, 18-23). These complexes are also useful in vivo as a preventative or therapeutic antitumor vaccine (Example 14, 15, 16, 18-23). They are also used ex vivo to produce a population of tumor specific effector T or NKT cells for the adoptive immunotherapy cancer by methods and protocols given in Examples 7, 15, 16, 18-23 and 36.

[1078] The mannose receptor delivers the complex to the late endosomal and lysosomal vesicles and the MHC class II loading compartment where the antigen is loaded onto CD1b molecules. The C1b molecule is endocytosed at the plasma membrane in coated pits and vesicle structures, transits to early endosomes and is then delivered to the MHC class II antigen loading compartment. The endosomal localization motif on the tail of the CD1b molecule is essential for antigen trafficking of CD1b through the lysosomal compartment required for loading of antigen into CD1b and its ultimate transport to the membrane. The antigen binding groove of CD1 is deeper and narrower than the MHC class I molecule groove containing a hydrophobic binding site which accommodates the lipid portion of the molecules such as lipoarabinomannan or GalCer and the SAg-LPS constructs given herein. APCs expressing the above constructs are exposed to NKT cell populations which recognize the antigens in the context of the CD1 receptor. If carried out ex vivo this results in the formation of tumor specific effector NKT cells which are used for adoptive immunotherapy by protocols given in Examples 7, 15, 16, 18-23).

### EXAMPLE 5

### SAg Conjugation to Glycosylceramides, Gangliosides, LPS's, Glycans, Peptidoglycans Phytosphingolipids, Lipoproteins, oxyLDL and Lipoarabinomannans

[1079] All of the SAg-lipid conjugates given above and in section 55 are prepared as follows. Selection of the SAg peptide to be used for coupling is governed by several criteria. In practice, a 10-15 residue peptide is selected. For SAgs, the sites chosen for coupling are those presumed not to be vitally involved in T cell binding and activation. In most SAgs, these sites are broadly distributed throughout the molecule. They are available at flexible regions of the protein and on reverse turns or loop structures. C termini are more mobile than the rest of the molecule and frequently exposed on the protein surface. This region is accessible to be coupled to another ligand especially using m-maleimidobenzoyl-N-hydroxysuccinimide ester (MBS) via a Cys residue that has been added to the N terminus of the peptide. By coupling the peptide via its N-terminal end, the peptide is exposed in a fashion similar to that found in the native antigen.

[1080] Additional criteria for selection of the coupling site such as exposed hydrophilic regions, secondary structure, hydropathicity profiles, and probability of helix formation may not be useful. However, care is take not to disrupt predicted polysaccharide attachment sites, most notably the sequence Asn-X-Ser or Asn-X-Thr, which predicts the presence of Asn-linked polysaccharide moieties. In addition to location of transmembrane regions, Asn-linked glycosylation sites and sites of signal sequence cleavage are all important. After due consideration, the C using 7-15 residues terminus is preferred and is modified to accommodate MBS. This procedure requires a free sulfhydryl group on the synthetic peptide and free amino groups on the ligand. Therefore, to use this method, it is necessary to add a Cys residue to the C or N terminus of the peptide.

[1081] Biochemical Conjugation Methods: SAgs are conjugated to polysaccharide containing structures using several methods well described in the art (Hermanson, G T, Bioconjugate Techniques, Academic Press, San Diego, Calif. 1996). Two methods are given here one utilizing the isolated complex carbohydrate obtained from the purified ganglioside which is then chemically conjugated to SAg and in another method wherein the ganglioside and SAg are both incorporated into a liposomal membrane. Either method is used to produce complexes which are included within the scope of this invention. However they are by no means exhaustive of all the techniques which could be employed to conjugate human tumor antigens to SAg molecules. Other conjugation strategies may be utilized to produce an immunologically active complex as described by this invention. (See Offord, R E., in Protein Engineering, A R Rees, ed., Oxford, 1992)

[1082] Direct Conjugation of Ganglioside, LPS or Peptidoglycan to SAg Molecules

[1083] 1. Ganglioside or LPS antigens are purified and are then dissolved in aqueous solution at pH 6.0 at a concentration of 1.0 mM/ml

[1084] 2. Endoglycoceramidase from Rhodococcus (Genzyme) is added to the ganglioside solution to a level of 5 milliunits. The solution is incubated overnight at 37° C. with gentle agitation. The endoglycoceramidase specifically cleaves at the ceramide-polysaccharide bond liberating ceramide and clipping off the complex carbohydrate making up the ganglioside

[1085] 3. The polysaccharide is isolated by HPLC size exclusion chromatography or by ultrafiltration

[1086] 4. SAg is dissolved in IM sodium phosphate, 0.15 M NaCl, pH 7.5, at a concentration of 1 mg/ml. The purified polysaccharide antigen is added to this solution to a concentration of at least 1 mM/ml.

[1087] 5. In a fume hood, 20 microliters of 5M sodium cyanoborohydride solution in 1M NaOH (Aldrich) is added to each ml of the SAg solution.

[1088] 6. The reaction is mixed gently and incubated at room temperature for 72 hours or 4° C. for 1 week. This reaction reductively aminates the reducing end of the polysaccharide (at the point it was cleaved by the endoglycoceramidase) to the amine groups on the SAg protein creating stable conjugate coupled through a secondary amine linkage. The degree of polysaccharide coupling can be controlled by limiting the time of reaction.

[1089] 7. Remove unreacted carbohydrate and cyanoborohydride by gel filtration on Sephadex G-25 or by dialysis.

[1090] In a second method, SAg-GalCer, SAg-GalCer-CD1, SAg-glycosphingolipid, or SAg-glycosphingolipid-CD1 complexes or SAg conjugates given in section 55 are produced which have the added benefit of presenting the glycosylceramide in a polyvalent array which is important for high affinity binding to complementary receptors. They retain nearly all of their original structure including most of the ceramide moiety and the entire oligosaccharide chain. The principle of preparation derived from Mahoney, J A et al., Meth. Enzymol 242: 17-27 (1994) is as follows. The fatty acid amide is hydrolyzed from the intact ganglioside converting it to its lyso form which has a unique primary amine at the 2-position of sphingosine. The lysoganglioside is treated with a bifunctional cross-linking reagent, succinimidyl 4(N-maleimidomethyl)cyclohexane 1-carboxylate (SMCC), which forms an amide bond to the 2-position of sphingosine and results in a sulfhydryl-reactive maleimidyl moiety attached through a linker arm, to the original position of the fatty acid amide on the ceramide portion of the ganglioside. The SAg protein is treated with a reagent, N-succinimidyl S-acetylthioacetate (SATA), which converts the lysine e-amino groups to acetylated sulfhydryls. Subsequent treatment with hydroxylamine reveals the desired free sulfhydryls. Treatment of sulfhydryl-derivatized SAg with maleimidyl derivatized ganglioside results in a stable thioester linkage between the ganglioside and the protein. The final product is chromatographically purified and characterized by protein and carbohydrate analysis. The SAg-GalCer or SAg-glycosphingolipid complex is then loaded onto a soluble CD1 receptor.

[1091] LPS's and peptidoglycans are conjugated to SAg by methods well described in the art. The most convenient and preferred method to target specifically the polysaccharides on the protein is through mild sodium periodate oxidation. Periodate cleaves adjacent hydroxyl groups in sugar residues to create highly reactive aldehyde functional groups. The generated aldehydes are used to in coupling reactions with amine or hydrazide containing molecules to form covalent linkages. Amines react with formyl groups under reductive amination conditions using a suitable reducing agent such as sodium cyanoborohydride. The result of the reaction is a stable secondary amine linkage. Hydrazides spontaneously react with aldehydes to form hydrazone linkages, although the addition of a reducing agent greatly increases the efficiency of the reaction and the stability of the bond. (See Hermanson, G T. Bioconjugate Techniques, Academic Press, San Diego Calif. 1996).

[1092] Production of Liposomes Displaying Glycolipid or Apolipoprotein or oxyLDL-SAg Complexes

[1093] Liposomes composed of the highly immunogenic constructs described herein are prepared. They may include lipoproteins such as SAgs coupled to Gal, GalCer, SAg-glycosphingolipid, SAg-glycosylceramides, SAg-phytosphingolipids, SAg-mycosphingolipid and SAg-lipid conjugates given in section 55. Liposomes comprising SAgs conjugated to apolipoproteins or oxyLDL receptors are useful for targeting endothelial or macrophage oxyLDL receptors in tumor microvasculature. Other SAg conjugates e.g., SAg-glycosphingolipid, SAg-glycosylceramides, SAg-phytosphingolipids, SAg-mycosphingolipid are useful in immunizing T cells, NK cells and NKT cells. Cationic liposomes are also useful as a means of transferring the nucleic acid constructs of this invention to tumor tissue. GalCer (a monogalactosylceramide) comprises the major portion of the liposome. The most effective lengths of fatty acyl chain and sphingosine (or ceramide) base are C26 and C18 respectively and a phytosphingosine backbone. Sphingolipids lend structural advantages to the integrity of liposomal membranes and have prolonged duration in vivo. The Gal carbohydrate epitope is linked to liposomes via the amphipathic properties of the surface sphingolipids. The Gal is converted to a glycolipid with a sphingosine backbone possessing a hydrophobic fatty acid tail that embeds them into membrane bilayers. The hydrophilic carbohydrate ends of these amphipathic molecules can interact with molecules dissolved in the surrounding environment. Sphingosine glycolipids consisting of lactosylceramide, GalGal(1-3)Gal(1-4)GlcNAc-R) or glycosphingolipids with terminal Gal(α1-4)Gal are prepared in a manner similar to that of sphingolipids.

[1094] All methods of preparation of liposomes have several steps in common: (1) dissolution of the lipid mixture in an organic solvent, (2) dispersion in an aqueous phase, and (3) fractionation to isolate the correct liposomal population.

[1095] In the first stage, the desired mix of lipid components is dissolved in organic solvent (usually chloroform:methanol (2:1 by volume) to create a homogenous mixture. This mixture includes any phospholipid derivatized to contain reactive groups as well as other lipids used to form and stabilize the bulk of the liposomal structure. The correct ratio of lipid constituents to form stable liposomes is important A reliable liposomal composition for encapsulating aqueous substances contains molar ratios of lecithin:cholesterol:negatively charged phospholipid (e.g., phosphatidyl glycerol) of 0.9:1:0.1. Apolipoproteins (e.g., LP(a)) or oxyLDL (e.g., 7β-hydroperoxycholesterol or 7β-hydroperoxy-choles-5-en-3β-ol) can substitute for cholesterol in the preparation of the liposomes. In general, to maintain membrane stability, the PE derivative should not exceed a concentration ratio of about 1-10 mol PE per 100 mol of total lipid. Once the desired mixture of lipid components is dissolved and homogenized in organic solvent, several techniques are used to disperse the liposomes in aqueous solution. These methods are broadly classified as (1) mechanical dispersion, (2) detergent-assisted solubilization, and (3) solvent-mediated dispersion. With mechanical dispersion to form vesicles, the lipid solution is dried to remove all traces of organic solvent prior to dispersion in aqueous media. The dispersion process is key to producing liposomal membranes of the correct morphology. Methods utilized include simple shaking, high pressure emulsification, sonication, extrusion through small-pores membranes and various freeze-thaw techniques. Detergent-assisted solubilization is also used to bring the lipid more effectively into the aqueous phase for dispersion. Triton X, alkyl glycosides or bile salts such as sodium deoxycholate are employed. Other modalities or dispersion include the steps of dissolving phospholipids and other lipid to be part of the liposomal membrane in ethanol. This ethanolic solution is then rapidly injected into an aqueous solution of 0.16 M KCl using a Hamilton syringe resulting in a maximum concentration of no more than 7.5% ethanol. Using this method, single bilayer liposomes of about 25-nm diameter are produced. To remove the excess aqueous components that are not encapsulated during the vesicle formation, gel filtration using Sephadex G-50 or dialysis is employed. To fractionate the liposome population according to size, gel filtration is carried out using a column of Sepharose 2B or 4B

[1096] SAgs are conjugated to the GalCer or glycosphingolipids with terminal Gal(a1-4)Gal, apolipoproteins, LDL or oxyLDL or LDL receptors before incorporation into the liposomal membrane or they may be incorporated into the membrane during the preparation of the liposomal membrane. Likewise, the SAg is conjugated to GalCer or glycosphingolipids with terminal Gal(a1-4)Gal at the glycolipid's polar head region by methods well known in the art including using heterobifunctional crosslinkers or periodate oxidation techniques. Alternatively, after the GalCer or glycosphingolipids with terminal Gal(a1-4)Gal is incorporated into the membrane, the liposomes are derivatized for further binding to the SAg proteins using the sodium periodate which oxidizes the ceramide's free hydroxyl to an aldehyde which is further modified by reductive amination. Using the phosphatidylethanolamine of the lipid in the liposome, SAgs are coupled to the liposome using various bifunctional agents including carbodiimide, glutaraldehyde, dimethyl suberimidate, periodate oxidation followed by reductive amination, N-succinimidyl 3-(2-pyridyldithio)propionate (SPDP), succinmidyl-4-(p-maleimidophenyl)butyrate (SMPB), iodoacetate, succinimidyl-4-(N-maleimidomethyl) cyclohexane-1-carboxylate (SMCC).

[1097] Two general methods are used to prepare immunogenic (i) SAg-GalCer, (ii) GalCerGal, (iii) GalCerGal-SAg and (iv) SAg-glycosphingolipid complexes: The molecules (1) are dissolved in solution and encapsulated within the vesicle construction, or (2) covalently coupled to phospholipid constituents in the lipids using standard cross-linking chemical reactions. Covalent coupling of SAg to liposomes is done through the head groups using various phospholipid derivatives and cross-linking chemical reactions. These are done via the PE molecules. Simple encapsulation is also a viable technique as described in Hermanson (supra).

[1098] A sample method using periodate oxidation and reductive amination is given below.

[1099] 1. A 5 mg/ml liposome suspension is prepared in 20 mM sodium phosphate 0.15 M NaCl, pH 7.4. containing, on a molar ratio basis as mixture of phosphatidyl choline: cholesterol:phosphatidyl glycerol of 8:10:1. Other liposome compositions may be used, for example methods without cholesterol, as long as a periodate-oxidizable component containing vicinal hydroxyls (e.g., phosphatidyl glycerol) is present. Any method of liposome formation may be used that is common to those skilled in the art including mechanical dispersion.

[1100] 2. Sodium periodate is dissolved to a concentration of 0.6 M by adding 128 mg/ml of water. 200 ml of this stock periodate solution is added to each mol of the liposome suspension with stirring.

[1101] 3. React for 30 min. at room temperature in the dark.

[1102] 4. The oxidized liposomes are dialyzed against 20 mM sodium borate, 0.15 M NaCl, pH 8.4, to remove unreacted periodate. This buffer is ideal for the subsequent coupling reaction. Chromatographic purification using a column of Sephadex G50 is also done. The periodate-oxidized liposomes are used immediately to couple with SAg molecules or they may be stored in a lyophilized state in the presence of sorbitol for later use.

[1103] 5. SAg is added to the periodate oxidized liposome solution to obtain a 1 mg/ml concentration.

[1104] 6. In a fume hood, add 20 ml of 5 M sodium cyanoborohydride solution in 1 M NaOH (Aldrich) to each ml of the SAg solution.

[1105] 7. The reaction is mixed gently and incubated at room temperature for 6 hours.

[1106] 8. Excess SAg and cyanoborohydride are removed by size exclusion chromatography on a column of Sephadex G-50 or by dialysis using a membrane with a molecular weight cutoff of 100,000 daltons.

[1107] 9. Ganglioside antigens isolated by the method described previously are incorporated into SAg-containing liposomes by detergent dialysis. An amount of ganglioside is added representing twice the amount of phosphatidyl glycerol (on a molar basis) originally added to form the liposome (prior to periodate oxidation). To this solution, concentrated sodium deoxycholate is added to obtain a final concentration of 0.7% (w/w) and mixed thoroughly using a Vortex mixer. Finally, the liposome suspension is dialyzed against PBS, pH 7.5. A sample of the encapsulation technique is given in Hermanson, supra.

[1108] An additional method for preparation of liposomes containing GalCer or glycosphingolipids with terminal Gal(a1-4)Gal is as follows: The donor liposomes consist of liver phosphatidylcholine, dicetyl phosphate, cholesterol, 3-(Man1-3Man-sn-1,2diacylglycerol) and galactosylceramide. These are mixed in various percentages to permit optimal expression of the galactosylceramide. Constituent lipids in chloroform-methanol are mixed and dried under a stream of nitrogen. Buffer consisting of 0.15M NaCl, 10 MM sodium Phosphate, pH 7.4, 1 mM dithiothreitol, 0.02% NaN3 is added to the dried lipids at a volume of 1 ml per 0.9 mmol of lipid phosphorus in the donor liposomes. After a 30-min incubation at 25° C., the lipids are dispersed into the buffer by sonication with a Bransom sonifier for 30 min under nitrogen at 0° C. The liposome suspension is used the same day after centrifugation at 1500 g for 30 min to remove any undispersed lipid and titanium fragments released from the sonication probe.

[1109] Liposomes used for transfer of nucleic acid constructs given herein have unique structures as described below. A cationic liposome composed of dimyristyloxypropyl-3-dimethyl-hydroxyl ammonium (DMRIE) with DOPE has allowed up to 100 fold higher concentrations of lipid and DNA to be administered in vivo with minimal toxicity. Improved transfection techniques have been observed with the DMRIE/DOPE of two to seven fold. The prototype cationic lipid for gene transfer is DOTMA (N[1-(2,3-dioleyloxy)propyl]-N,N,N-tri-methylammonium chloride) which is mixed with a equimolar amount of DOPE (dioleoyl phosphatidylethanolamine). The lipid DOTMA/DOPE comprise the cationic liposome known a Lipofectin. For human studies, two different cationic liposomes formulations are used. The first includes DC-cholesterol(3b[N-(N′N′-dimethylaminoethane)-carbamoyl] cholesterol) mixed with DOPE. DC-cholesterol/DOPE is low concentrations has proven to reduce toxicity to cells in vitro, is metabolized in vivo, and has provided successful gene transfer into malignant tumors in humans (See Example 17 for use in humans).

[1110] Genetic Fusion of SAgs to LPS's

[1111] N-linked glycosylation occurs exclusively in the ER, where Glc3Man9GlcNAc2 is added to Asn residues present in the sequence Asn X Ser/Thr (X, any residue except Pro). To produce a glycosylation site on a SAg capable of binding a LPS, recombinant vaccinia virus expressing SAg is produced with Gln149 or Asn149 directed to the ER by appendage of NH2-terminal ER insertion, The SAg is directed to the secretory pathway using signal sequence from IFN. Recombinant vaccinia viruses(rVVs) expressing TAP and SAg nucleoprotein are used. The full length SAg gene modified by standard molecular genetic methods to encode glycosylation sites is inserted into the thymidine kinase locus of vaccinia viruses (VVs) by homologous recombination as described using the pSX11 plasmid to express foreign proteins under the control of the VV p7.5 early/late promoter. SAg nucleoprotein is directed to the secretory pathway using the signal sequence from IFN-β. The SAg coding sequences of all of the rVVs are verified by sequencing PCR-amplified copies of full-length NP genes isolated from the rVV. The resulting SAg-LPS or SAg-lipoprotein complexes are used to immunize a population of T or NKT effector cells for use in the adoptive immunotherapy of cancer (Examples 2, 5, 7 15, 16, 18-23). They may be preloaded onto CD1 or MHC Class I or II receptors on APCs as described below in the course of ex vivo immunization. These complexes may also be used in vivo as a preventative or therapeutic antitumor vaccine as in Example 14, 15, 16, 18-23).

[1112] Preparation of Fusion Proteins

[1113] Preferred fusion proteins comprise SAgs linked to other proteins or peptides such as VTs or their A and B subunits, IFNα receptors, CD19 peptides or carbohydrate recognition units which are designed to target the SAg to glycosphingolipid receptors on tumor cells or αᵥβ₃ ligand Arg-Gly-Asp or avβ5 ligand Asn-Gly-Arg in vivo or in vitro. These fusion proteins induce apoptosis of the tumor cells. The fusion proteins are produced by conventional methods in a variety of cells using a variety of vectors such as phage 1 regulatory sequences. Techniques are well established for producing fusion proteins that include the lacZ protein(β-galactosidase), trpE protein, glutathione-S-transferase, and thioredoxin. Expression in E. coli is most conventional but baculoviral expression systems are also useful. Fusion proteins are produced in bacteria by placing a strong, regulated promoter and an efficient ribosome-binding site upstream of the cloned gene. Exemplified below is a procedure using a representative lacZ vector. However, it should be recognized that other vectors well known in the art would be useful. Plasmids encoding the above proteins are prepared as previously described.

[1114] Construction of Expression Plasmids and Detection of Fusion Proteins

[1115] 1. The appropriate pUR (or pEX or pMR100) vector is ligated in-frame to cDNA fragments to be expressed as fusion partners using the above plasmids to create an in-frame fusion. cDNA encoding the verotoxins may be obtained from Dr. G. Lingwood, University of Toronto; murine p31 Ii are from Dr. R. Germain, National Institutes of Health and J. Miller, University of Chicago.

[1116] 2. Bacteria of the following strains are transformed: E. coli K12 71/18 or JM1O3 with pUR vectors, M5219 with pEX vectors or LG9O for pMR100 vectors. The cells are plated on LB medium containing ampicillin (100 mg/ml) and incubated overnight at 37° C. (or 30° C. in the case of the pEX vector). MacConkey lactose indicator plates should be used for pMR100.

[1117] 3. Individual colonies are tested for the presence of the desired insert by plasmid minipreps. If most of the colonies can be assumed to contain a cDNA (because directional cloning or a dephosphorylated vector was used in step 1), they can be screened for protein production in parallel (see step 4b). If not, clones that contain a cDNA, as determined by plasmid minipreps, can be screened for protein expression later. cDNA inserts into a pMR100 plasmid can be detected readily as red colonies on the MacConkey lactose indicator plates.

[1118] 4. Colonies are screened as follows for expression of the fusion protein.

[1119] a. Grow small cultures from 5-10 colonies in LB medium containing ampicillin (100 mg/ml). Incubate overnight at 37° C. (or at 30° C. for pEX).

[1120] b. Inoculate 5 ml of LB medium containing ampicillin (100 mg/ml) with 50 ml of each overnight culture. Incubate for 2 hours at 37° C. (or at 30° C. for pEX) with aeration. Remove 1 ml of uninduced culture, place it in a microfuge tube, and process as described in steps d and e. If screening for protein production is being done in parallel, prepare plasmid minipreps from 1-ml aliquots of the overnight cultures.

[1121] c. Induce each culture as follows: For pUR or pMR100 vectors, add isopropylthio-β-D-galactoside (IPTG) to a final concentration of 1 nM and continue incubation at 37° C. with aeration. For pEX vectors, transfer the culture to 40° C. and continue incubating with aeration.

[1122] d. At various time points during the incubation (i.e., 1, 2, 3, and 4 hours), transfer 1 ml of each culture to a microfuge tube, and centrifuge at 12,000 g for 1 minute at room temperature in a microfuge. Remove the supernatant by aspiration. The kinetics of induction varies with different proteins, so it is necessary to determine the time at which the maximum amount of product is produced.

[1123] e. Resuspend each pellet in 100 ml of 1×SDS gel-loading buffer, heat to 100° C. for 3 minutes, and then centrifuge at 12,000 g for 1 minute at room temperature. Load 15 ml of each suspension on a 6% SDS polyacrylamide gel. Use suspensions of cells containing the vector alone as a control. (For pEX and ORF vectors, also use β-galactosidase as a control.) The fusion protein should appear as a novel band migrating more slowly than the intense β-galactosidase band in the control. It is not uncommon for a protein the size of β-galactosidase to be present along with the fusion protein.

[1124] Composition of 1×SDS Gel-Loading Buffer

[1125] 50 mM Tris Cl (pH 6.8)

[1126] 100 mM dithiothreitol (DTT)

[1127] 2% SDS (electrophoresis grade)

[1128] 0.1% bromophenol blue

[1129] 10% glycerol

[1130] 1×SDS gel-loading buffer lacking dithiothreitol can be stored at room temperature.

[1131] Dithiothreitol should then be added, just before the buffer is used, from a 1 M stock.

[1132] Loading of SAg-LPS, SAg-Lipoprotein, SAg-Lipid, SAg-Glycolipid or SAg-Phytolipid Conjugates onto CD1 or MHC Receptors

[1133] For loading of SAg LPS or SAg-lipoprotein SAg-lipid, SAg-glycolipid SAg-phytolipid conjugates or SAg-lipid complexes from section 55 onto CD1 receptors, recombinant soluble CD1-2M complexes in Drosophila melanogaster cells are used to screen a random peptide phage display library(RPPDL). The absence of peptide-loading machinery in D. melanogaster cells results in the expression of class 1 molecules that are properly folded and functionally competent but essentially devoid of bound peptide. This approach has been shown to be useful in defining peptide binding motifs for classical and nonclassical MHC Class I and Class II molecules. (Jackson et al., Proc. Natl. Acad. Sci. 89:1217-1224, 1992; Hammer et al., J. Exp. Med 175,1007-1012, 1992; Hammer et al., Cell 74, 197-201, 1993). Each clone of SAg-lipoprotein contains a random 22-amino acid sequence at the mature NH2 terminus of the gene VIII (filamentous coat protein of the M13 bacteriophage). Recombinant soluble mCD1 is engineered with a C-terminal hemagglutinin (HA) tag, an epitope derived from the influenza HA protein. In this way, the mCD 1-phage complexes are identified with a HA tag specific antibody. For immunizing usage, isolated receptor or antigen presenting cells of various types which express CD1 or MHC class II molecule pretreated with formaldehyde may be used for loading the SAg-LPS or SAg-lipoprotein complexes. These APCs with bound complexes are then used to immunize T cells or NKT cells for use in adoptive immunotherapy of cancer (Examples 2, 7, 15, 16 18-23).

[1134] Incorporation of Exogenous Lipid e.g. Glycolipid, Phytosphingosine, Apolipoprotein or oxyLDL into Cells by Fusion with Liposomes

[1135] Liposomes. To prepare glycolipid, phytosphingosine, apolipoprotein, oxyLDL or receptor containing liposomes, 400 mg of galabiosylceramide (Gb2) globotriosylceramide (Gb3), globotetraosylceramide (Gb4), galactosylceramide (GalCer), glucosylceramide (GlcCer), phytoshpingosine, oxyLDL or apolipoprotein are dried with 200 mg of phosphatidylethanolamine (PE) and 200 mg of phosphatidylserine (PS) under a stream of nitrogen gas. 400 ml of sterile isotonic PBS, pH 7.4, is added to the lipid, and the mixture is sonicated using a water bath sonicator for 30 minutes. Liposome preparations are used immediately.

[1136] To incorporate exogenous glycolipid into cells, tumor cells in late logarithmic growth phase, sickled erythrocytes or vesicles (1.6×10⁷ cells) are washed twice with PBS to remove serum proteins and then suspended in serum-free RPMI 1640 medium at 4×10⁶ cells/ml. The cells are incubated in the presence of the liposomes (or PBS for controls) prepared as above with rotary shaking (100 rpm) at 37° C. for 1 hr., washed twice (5 min. 800×g) with PBS. and incubated for 18-24 hr at 37° C. in the presence of medium supplemented with 10% fetal calf serum prior to use.

[1137] Membrane & Vesicle Transfers. Exogenous lipids e.g., galactosylceramides from proximal tubular epithelial cells, MDCK canine renal cells or phytosphinosine from amphibian cells are incorporated into dendritic cells or tumor cells or dendritic cell (accessory cell)/tumor cell fusions as follows:

[1138] Preparation of Plasma Membrane Plasma membrane fractions are prepared and analyzed as described (Monneron A et al., J Cell Biol. 77: 211-231 (1978)). Only the lightest fractions (band 1 at the interface between buffer and 22.5% sucrose and band 2 at the interface between 22.5% and 35% sucrose), containing pure plasma membrane vesicles, are collected and pooled. From 10¹⁰ cells, 0.8-1.0 mg of protein is recovered in the combined fraction. The plasma membrane enzyme markers 5′-nucleotidase (EC 3.1.3.5) and alkaline phosphatase (EC 3.1.3.1) are enriched 30-fold and 70-fold, respectively, over the homogenate; no activity of the cytoplasmic enzyme lactate dehydrogenase are found. No traces of RNA or DNA contamination are found. The membranes obtained are either immediately frozen in aliquots at −70° C. or used at once.

[1139] Reconstituted Vesicles. Three types of vesicles are prepared as follows: (i) reconstitution of solubilized Sendai virus envelopes (V vesicles), (ii) reconstitution of solubilized plasma membranes (PM vesicles), and (iii) core constitution of solubilized Sendai virus envelope and plasma membranes (VPM vesicles). Sendai virus (20 mg of protein), solubilized in 2 ml of resolution buffer containing 2% Triton X-100 for 1 hr at room temperature, is centrifuged (1 hr. 100,000×g) to yield a clear supernatant (1.5 mg of protein per ml) containing mainly the two envelope glycoproteins, neuraminidase/hemagglutinin glycoprotein (NH) and fusion glycoprotein (F). For preparation of VPM vesicles, freshly solubilized plasma membranes (1 mg of protein per 0.3 ml of resolution buffer containing 1% Triton X-100, 20 min, 4° C.) are mixed with the solubilized viral envelopes (1 mg of protein per 0.7 ml of resolution buffer) and dialyzed in Spectrapor membrane-2 against 1000-fold excess of reconstitution buffer containing 1.5 g of wet Bio-beads SM-2 per liter [for efficient removal of the detergent]. PM and V vesicles are prepared by the same procedure except that one of the components was omitted and replaced by resolution buffer alone. Dialysis is continued for 96 hr at 4° C. until the Triton X-100 concentration dropped below 0.02%. The dialyzed solutions are centrifuged at 100.000×g for 3 hr at 4° C. to obtain reconstituted vesicles. The pellet is suspended in 0.3-0.5 ml of resolution buffer, divided into small aliquots, and frozen at −70° C. Each aliquot is thawed only once for fusion experiments.

[1140] Fusion of Reconstituted Vesicles with Tumor Cells: Tumor cells (10⁶ cells) are incubated with 5-30 mg of protein of reconstituted vesicles in 1 ml of fusion solution. After 60 mm at 4° C. with occasional shaking, during which the Sendai virus bound to the cells, the cells are collected by centrifugation, resuspended in 1 ml of fusion solution containing 5 mM Ca²⁺, and incubated at 37° C. for 30 mm for the fusion process. The cells are then washed with phosphate-buffered saline (pH 7.4) and suspended in RPMI-1640 medium containing 5% (vol/vol) heat-inactivated fetal calf serum.

[1141] Assessment of Incorporation: Tumor cells are analyzed for uptake of the various glycolipids, apolipoproteins, oxyLDL, phytosphingosine, glycosylceramides by use of direct staining with specific antisera, binding by lectin receptors and they are tested in vitro for activation of T cells, NK cells, NKT cells using proliferative assays and induction of cytokines IL-2, IL-4, IL-12 and IFN-g by methods well established in the art.

### EXAMPLE 6

### Targeting SAg Nucleic Acids, Phase Display Systems and Polypeptides to Tumor Sites

[1142] Parenterally administered nucleic acid is targeted to a particular cell population as follows. Nucleic acid is attached to a desialylated galactose moiety that targets asialo-orosomucoid receptors in liver cells. Nucleic acid is attached to other ligands such as transferrin and TAP-1 as well as antibodies to surface structures such as the Le^{v} receptor. These ligands and antibodies bind to surface structures and are internalized. Thus, the attached nucleic acid is delivered to a cell of choice.

[1143] Sickled Erythrocytes as Gene Carriers

[1144] Erythrocytes from patients with sickle cell anemia contain a high percentage of SS hemoglobin which under conditions of deoxygenation aggregate followed by the growth and alignment of fibers transforming the cell into a classic sickle shape. Retardation of the transit time of sickled erythrocytes results in vaso-occlusion. SS red blood cells have an adherent surface and attach more readily than normal cells to monolayers of cultured tumor endothelial cells. Reticulocytes from patients with SS disease have on their surface the integrin complex a4b1 which binds to both fibronectin and VCAM-1, a molecule expressed on the surface of tumor endothelial cells particularly after activation by inflammatory cytokines such as TNF, interleukins and lipid-mediated agonists (prostacyclins). Activated tumor endothelial cells are typically procoagulant. Similar molecules are upregulated on the neovasculature of tumors. In addition, upregulation of the adhesive and hemostatic properties of tumor endothelial cells are induced by viruses, such as herpes virus and Sendai virus. Sickled erythrocytes lack structural malleability and aggregate in the small tortuous microvasculature and sinusoids of tumors. In addition, the relative hypoxemia of the interior of tumors induces aggregation of sickled erythrocytes in tumor microvasculature. Hence, sickled erythrocytes with their proclivity to aggregate and bind to the tumor endothelium are ideal carriers of therapeutic genes to tumor cells.

[1145] Red blood cell mediated transfection is used to introduce various nucleic acids into the sickled erythrocytes. The extremely plastic structure of the erythrocyte and the ability to remove its cytoplasmic contents and reseal the plasma membranes enable the entrapment of different macromolecules within the so-called hemoglobin free “ghost.” Combining these ghosts and a fusogen such as polyethylene glycol has permitted the introduction of a variety of macromolecules into mammalian cells (Wiberg, F C et al., Nucleic Acid Res. 11: 7287-7289 (1983); Wiberg, F C et al., Mol. Cell. Biol. 6: 653-658 (1986); Wiberg, F C et al., Exp. Cell. Res. 173: 218-227 (1987). Both transient and stable expression of introduced DNA are achieved by this method. Sickled cells can also be transfected with a nucleic acid of choice e.g., apolipoproteins, RGD in the nucleated prereticulocyte phase (e.g. proerythroblast or normoblast stage) by methods given in Example 1. Sickled erythrocytes transfected with nucleic acids encoding a SAg and/or carbohydrate modifying enzyme to induce expression of the α-Gal epitope, apolipoproteins, RGD and/or any construct described herein. Nucleic acids encoding additional polypeptides alone or together with SAg as described in Tables I and II to including but not limited to angiostatin, apolipoproteins, RGD, streptococcal or staphylococcal hyaluronidase, chemokines, chemoattractants and Staphylococcal protein A are transfected into and expressed by sickled erythrocytes. These sickled cell transfectants are administered parenterally and localize to tumor neovascular endothelial sites where they induce a anti-tumor response. The methods of in vivo transfection of tumor cells are given in the Examples 17. Protocols for use of these transfectants in the induction of anti-tumor immune response are described in Examples 14, 15, 16, 18-23, 31.

[1146] Vesicles from Sickled Erythrocytes

[1147] Vesicles from sickled erythrocytes are shed from the parent cells. The contain membrane phospholipids which are similar to the parent cells but are depleted of spectrin. They also demonstrate that a shortened Russell's viper venom clotting time by 55% to 70% of control values and become more rigid under acid pH conditions. Rigid sickle cell vesicles induce hypercoagulability, are unable to pass through the splenic circulation from which they are rapidly removed. Sickled erythrocytes are transfected in the nucleated prereticulocyte phase with superantigen and apolipoprotein nucleic acids as well as RGD nucleic acids. Nucleic acids encoding additional polypeptides alone or together with SAg as described in Tables I and II are transfected into and expressed by sickled erythrocytes. Any of the immature or mature sickled erythrocytes and their shed vesicles expressing the molecules given in Tables I and II are capable of localizing to tumor microvascular sites where they bind to apolipoprotein receptors and induce an anti-tumor effect. Because of their adhesive and hypercoagulable properties as well as their rigid structure, these sickled cell vesicles expressing superantigen and apolipoproteins are especially useful for targeting the tumor microvascular endothelium and producing a prothrombotic, inflammatory anti tumor effect. Sickled erythrocytes and their vesicles are capable of acquiring oxyLDL via fusion with oxyLDL containing liposomes as in Example 5. The resulting sickle cell or liposome expresses oxyLDL alone or together with SAg. Binding of oxyLDL to the SREC receptor on tumor microvascular endothelial cells induces apoptosis and simultaneous superantigen deposition produces a potent T cell anti-tumor effect.

[1148] Vesicles are prepared and isolated as follows: Blood is obtained from patients with homozygous sickle cell anaemia. The PCV range is 20-30%, reticulocyte range is 8-27%, fetal hemoglobin range is 25-13% and endogenous level of ISCs is 2-8%. Blood is collected in heparin and the red cells are separated by centrifugation and washed three times with 09% saline. Cells are incubated at 37° C. and 10% PCV in Krebs-Ringer solutions in which the normal bicarbonate buffer is replaced by 20 mM Hepes-NaOH buffer and which contains either 1 mM CaCl2 or 1 mM EGTA. All solutions contain penicillin (200 u/ml) and streptomycin sulphate (100 μg/ml). Control samples of normal erythrocytes are incubated in parallel with the sickle cells. Incubations of 10 ml aliquots are conducted in either 100% N₂ or in room air for various periods in a shaking water bath (100 oscillations per mm). N₂ overlaying is obtained by allowing specimens to equilibrate for 45 mm in a sealed glove box (Gallenkamp) which was flushed with 100% N₂. Residual oxygen tension in the sealed box was less than 1 mmHg. The percentage of irreversibly sickled cells is determined by counting. 1000 cells-after oxygenation in room air for 30 mm and fixation in buffered saline (130 mM Cl, 20 mM sodium phosphate, pH 74) containing 2% glutaraldehyde. Cells whose length is greater than twice the width and which possessed one or more pointed extremities under oxygenated conditions are considered to be irreversibly sickled.

[1149] After various periods of incubation, cells are sedimented at 500 g for 5 mm and microvesicles) are isolated from the supernatant solution by centrifugation at 15,000 g for 15 mm. The microvesicles form a firm bright red pellet sometimes overlain by a pink, flocculent pellet of ghosts (in those cases where lysis was evident) which is removed by aspiration. Quantitation of microvesicles is achieved by resuspension of the red pellet in 1 ml of 05% Triton X100 followed by measurement of the optical density of the clear solution at 550 nm. Optical density measurements at 550 nm give results that are relatively the same as measurements of phospholipid and cholesterol content in the microvesicles. Cell lysis is determined by measurement of the optical density at 550 nm of the clear supernatant solution remaining after sedimentation of the microvesicles. Larger samples of microvesicles for biochemical and morphological analysis are prepared from both sickle and normal cells following incubation of up to 100 ml of cell suspension at 37° C. for 24 h in the absence or presence of Ca²⁺. Ghosts are prepared from sickle cells after various periods of incubation. The cells are lysed and the ghosts washed in 10 mM Tris HCl buffer, pH 73, containing 02 mM EGTA.

[1150] These vesicles are useful as a preventative or therapeutic vaccine as in Examples 15, 16, 18-23, 36.

[1151] Phage Displayed SAgs

[1152] Phages displaying or free tumor homing peptides ligands such as the tripeptides Arg-Gly-Asp and Asn-Gly-Arg which tripeptides bind to the integrins avβ3 and avβ5, respectively, that are located on tumor microvasculature, are conjugated to (1) a SAg peptide, (2) naked DNA encoding a SAg peptide or (3) phage displaying a SAg peptide. These constructs are prepared as in Examples 3 and 5 and are further described in Jackson R H. et al, In: Protein Engineering: A Practical Approach, A. R. Rees et al (eds), pp. 277-301, Oxford Press, London, 1992. Similarly tumor cells or sickled cells transfected with and expressing SAgs and other molecules given in Tables I and II are also transfected with nucleic acids encoding RGD which facilitates their localization to tumor microvasculature. These conjugates or transfectants are administered i.v. and localize to the tripeptides' integrin receptors situated on the tumor microvasculature. Neovascular endothelial cells to which these constructs have been targeted are transfected by SAg-encoding DNA so that they express or secrete SAgs locally. This induces potent local T cell activation and engender a tumoricidal immune response. Protocols for use of such conjugates, i.e., (1) naked SAg DNA conjugated to the integrin-binding peptides or (2) naked SAg DNA conjugated to phage that display the integrin-binding peptides, and transfectants in the induction of anti-tumor immune response are described in Examples 7, 15, 16, 18-23, 31

[1153] Nucleic Acid and Nucleoprotein SAg Mimics

[1154] SAgs are often incapable of homing to tumor cells expressing SAg receptors in vivo because of the existence of naturally occurring SAg-specific antibodies and the affinity of SAgs for class II receptors on a wide variety of cells. To solve this problem, DNA chromatography is used to identify oligonucleotides instead of SAg peptides that bind to SAg receptors which are naturally expressed on tumor cells. The SAg receptor-specific oligonucleotides are conjugated to a SAg peptide with a functional TCR or NKT cell binding site. Oligonucleotides are also substituted for peptides in the SAg molecule which bind to MHC class receptors and naturally occurring SAg-specific antibodies. These conjugates are used to target SAgs to tumor cells in vivo that either endogenously express a SAg receptor or are pre-transfected with nucleic acid encoding a SAg receptor.

[1155] These peptide-oligonucleotide complexes are prepared by chemical conjugation methods well known in the art. Such receptor specific oligonucleotides may have several fold greater affinity for the SAg receptor compared to the native SAg. While these peptide-oligonucleotide complexes are used predominantly in vivo to target tumor cells bearing SAg receptors, they are also used ex vivo to stimulate T cells to become tumor specific effector cell which are useful for adoptive immunotherapy of cancer (Example 7, 15, 16, 18-23).

[1156] In appropriate recombinant bacteria, nucleic acids encoding the SAg receptor binding site expressed on tumor cells are fused to nucleic acids encoding SAgs. The resultant SAg polypeptide construct consists of the amino acid sequence of a SAg and its SAg receptor binding site (which is overexpressed if desired). The SAg with its expressed or overexpressed SAg binding site is useful in targeting tumor cells expressing SAg receptors after administration to a tumor-bearing host.

[1157] In a related construct, the nucleic acid encoding a SAg with an overexpressed SAg receptor specific binding site is fused to the nucleic acid encoding a native or chimeric SAg with its binding site for naturally occurring antibodies and its MHC class II binding site removed, mutated or replaced by peptides from another SAg against which there are no known naturally occurring antibodies. The TCR binding and activating region of this molecule is conserved. This resulting SAg polypeptide molecule binds to SAg receptors on tumor cells but also retains its capacity to activate the TCR. It is administered parenterally or orally to a tumor bearing host (orally to a colon carcinoma patient) and will effectively target tumor cells with SAg receptors (such as colon carcinoma cells) without being diverted by naturally occurring antibodies or class II receptor bearing cells present in whole blood. As such, this construct is useful in producing an anti-tumor effect when administered to a tumor bearing host as in Example 18-23).

[1158] Using DNA chromatography techniques, nucleic acid specific for SAg receptors on tumor cells are identified. These nucleotides are conjugated to SAg polypeptides which are optionally devoid of class II binding sites and naturally occurring antibody binding sites but with conserved TCR binding and activating sites. These constructs are useful in targeting tumor cells bearing SAg receptors in vivo while retaining SAg amino acid sequences specific for the TCR which are capable of producing a tumor specific T cell population effective in adoptive immunotherapy of cancer. The selected amino acid sequences are deleted, replaced or added to the SAg molecules using molecular cloning and site directed mutagenesis techniques well established in the art.

### EXAMPLE 7

### General Ex vivo Immunization Methods to Produce Tumor Specific Effector Cells for Adoptive Immunotherapy of Cancer

[1159] Several days (3 to 60 days) after intratumoral immunization with a nucleic acid construct described herein, tumor draining lymph nodes are removed and placed in tissue culture. These cells are further expanded in vitro with SAg polypeptide for 2-4 days and/or IL-2 in vitro for a total of 3-15 days. These T cells are then harvested and reinfused into the host. T effector cells produced after in vivo immunization with nucleic acid encoding a SAg are expected to display potent anti-tumor activity.

[1160] Cells transfected ex vivo, are administered to the host wherein they activate lymphocytes in a number of ways. In one embodiment, the initial step involves in vivo immunization of hosts using various transfectants and constructs as described in Table II. The transfected cells are introduced into the host tumor, a nearby region, subcutaneously in close proximity to regional lymph nodes, or the lymph nodes draining the tumor. Transfected cells types, constructs and agents used in this step are given in Table II. Tumor cells are irradiated or treated with mitomycin C after transfection with nucleic acid encoding a SAg and/or another polypeptide so that polypeptides are expressed and fixed on the cell surface and the tumor cells do not proliferate when administered to the host.

[1161] In another embodiment, the initial step involves in vivo immunization of the tumor bearing host with transfectants, constructs and cells as described in Table III. These agents are administered in close proximity to the regional lymph nodes with or without a bacterial adjuvant such as bacillus Calmette-Guerin (BCG) or Corynebacterium parvum. The lymph node cells are harvested 10 days later and tissue cultured for further in vitro immunization/stimulation with SAg or SAg expressing cells that, optionally, coexpress a tumor associated antigen, costimulatory molecule or antigen presenting molecule.

[1162] Cryopreserved autologous tumor cells for subsequent tumor vaccination and culture are obtained from patients. Fresh resected tumors are dissociated under sterile conditions into single cell suspensions by mechanically mincing tumor into 5-mm3 pieces followed by enzymatic digestion. Generally, 1 gm of tumor is digested in a minimum volume of 40 ml of an enzyme mixture consisting of Hank's balanced salt solution (HBSS) containing 2.5 units/ml of hyaluronidase type V, 0.5 mg/ml of collagenase type IV, and 0.05 mg/ml of deoxyribonuclease type I (all commercially available from Sigma Chemical Co.; St. Louis, Mo.). The digestion is performed at room temperature with constant stirring in a trypsinizing flask for 2 to 6 hours.

[1163] The resulting cell suspension is filtered through a layer of No. 100 nylon mesh (Nytek: TETKO, Inc.; Briarcliff Manor, N.Y.) and cryopreserved in 90% human AB serum (GIBCO; Grand Island, N.Y.) plus 10% dimethyl sulfoxide (Sigma) at −178° C. in liquid nitrogen for subsequent immunization and culture.

[1164] Tumor cells are used in native form, with dinitrophenyl (DNP) or other haptens conjugated to them and then irradiated or treated with cytostatic drugs prior to use. Optionally, the tumor cells are transfected with nucleic acid encoding a SAg, and/or tumor associated antigen, and/or antigen presenting molecule, and/or costimulatory molecule, and/or adhesion molecule, and/or xenogeneic antigen, and/or carbohydrate modifying enzyme. The nucleic acid is introduced by methods given previously. The cells are then irradiated to a dose of 25 Gy or treated or with cytostatic drugs, viable cells counted by trypan blue exclusion and the cells resuspended so that a volume of 0.2 to 0.4 ml contains 1-2×10⁷ with or without ⁷ colony forming units of fresh frozen TICE BCG.

[1165] Patients are vaccinated intradermally (i.d.) at two sites approximately 10 cm from superficial inguinal lymph nodes. If necessary, axillary lymph nodes are used. Lymph node regions with previous dissections or clinical evidence of tumor are avoided.

[1166] Accessory cells including DCs, fibroblasts, endothelial cells, monocytes, and macrophages are used after transfection with nucleic acid encoding a tumor associated antigen, and/or SAg, and/or xenogeneic antigen, and/or carbohydrate modifying enzyme. If desired, these accessory cells or APCs are transfected with recombinant viral vectors containing nucleic acid the encode a SAg, and/or tumor associated antigen, and/or costimulatory molecule, and/or antigen presenting molecule, and/or costimulatory molecule, and/or adhesion molecule, and/or xenogeneic antigen. These cells need not be irradiated prior to administration. These cells are administered using the same cell numbers given above with or without BCG.

[1167] Alternatively, patients are vaccinated with various tumor associated antigens and other agents as described in Table II. The agents are bound to MHC class I, class II or CD1 receptors or to cells expressing these receptors. They are also given alone in doses ranging from 0.1 to 10 mg emulsified in various adjuvants well described in the art. A vaccination course includes up to 6 inoculations of the above agents at 1-3 week intervals.

TABLE III
Single Step In Vivo Immunization of Tumor Bearing Hosts with SAg Nucleic
Acids Alone, Combined with Nucleic Acid Encoding Other Peptides and
SAg Nucleic acids Conjugated to Polypeptides or Liposomes

| I. | Intratumoral injection of nucleic acid | | |
|---|---|---|---|
| | 1. | Direct injection of SAg nucleic acids into tumor. | |
| | 2. | Direct i.v. or intra-arterial injection of SAg nucleic acids into tumor microvasculature. | |
| | | a. | SAg nucleic acids conjugated to a polypeptide ligand specific for a tumor |
| | | | cell, tumor stromal cell, tumor microvascular or neovascular cell receptors |
| | | b. | Nucleic acid within liposomes containing a monoclonal antibody. |
| | 3. | Recombinant viruses containing nucleic acid. | |
| | | a. | Inactivate the virus in the host with gancyclovir |

| II. | After in vivo immunization (3-14 days), harvest regional lymph nodes and place in tissue | |
|---|---|---|
| | culture. | |
| III. | Activate and expand lymphocytes. | |
| | 1. | Treat with SAg for 2 days. |
| | 2. | Treat with IL-2 for 3 days. |

| | |
|---|---|
| IV. | Inject tumor specific effector T cells into host. |

[1168] Regional lymph node cells draining tumor sites, lymphoid cells obtained after the above priming, peripheral blood T cells, and tumor infiltrating lymphocytes (TILs) are suitable sources of T cells that are activated to function as effector cells (T cells activated against the cancer cells). T cells are obtained from tumor infiltrating lymphocytes either before or after tumor vaccine immunization in vivo by the methods described herein.

[1169] Approximately 10 days after in vivo immunization, an enlarged draining lymph node is removed and cultured. An immunized lymph node used herein is exemplary. A single cell suspension of lymph node cells is obtained by mechanical dissociation. Briefly, lymph nodes are minced into 2 mm³ pieces in cold HBSS with a scalpel. The fragments are then pressed through a stainless steel mesh with a glass syringe plunger. The resultant cell suspension is filtered through nylon mesh and washed in HBSS. Cultures are established in 300-ml culture bags (Livecell Flasks; Fenwal, Deerfield, Ill.) with 200 to 250 ml of culture medium (CM: RPMI 1640 with 10% human AB serum, 2 mM fresh L-glutamine, 1 mM sodium pyruvate, 100 mg/ml of streptomycin, and 50 mg/ml of gentamicin all from GIBCO; Grand Island, N.Y.), containing 1-2×10⁵ lymph node cells/ml and 1-4×10⁵ irradiated (60 Gy) tumor cells/ml. Optionally, the lymph node cells are further separated into populations CD4+CD8+ T cells, NKT cells and/+T cells. Some SAg complexes are presented bound to MHC class II receptors and some such as SAg-LPS complexes or SAg-glycosylceramide complexes are presented bound to CD1 receptors either free or on APC cell surfaces.

[1170] After 24 hours, various SAgs or SAg transfected cell types (STCT) given in Table III are added in doses of 10⁵ to 10⁷ cells for 8-72 hours. The cells are harvested and used for in vivo administration at this point. Specific cell populations are selected such as those having a particular TCR V profile or expressing CD44 using magnetic beads or other separation techniques well known in the art. Optionally, the SAg activated T cells are expanded. Recombinant IL-2 (Cetus, Emeryville, Calif.: provided by Cancer Treatment Evaluation Program, National Cancer Institute) is added at the initiation of the cultures at a concentration of 600IU/ml (1 Cetus unit=6 IU of IL-2). Culture bags are incubated at 37° C. in humidified 5% CO2. Cell counts from aliquots obtained from random bags are followed to observe lymphoid cell proliferation. Lymph node cells are harvested when cells reached maximal density, usually after a total of 5-7 days in culture followed by IL-2 at 24 IU/ml for 3 days. These intervals are shortened depending on the cell viability, CD44 expression, or V expression or other conditions that adversely affect survival, viability, or therapeutic success.

[1171] Antibodies or Fab fragments having specificity for CTLA-4 are added with or without IL-2 at any point to expand the T cell population and avert apoptosis. The cells are washed once at the end of STCT incubation and before the addition of IL-2 and/or anti-CTLA-4 antibodies.

TABLE IV
Two Step In Vivo/in Vitro Methods and Agents for Producing Tumor Specific Effector T cells

| A. | In vivo immunization with SAg transfected tumor cells, accessory cells, or virus. | | |
|---|---|---|---|
| | 1. | Tumor cells transfected with: | |
| | | a. | Nucleic acid encoding a SAg |
| | | b. | Nucleic acid encoding a tumor associated antigen |
| | | c. | Nucleic acid encoding a carbohydrate modifying enzyme |
| | 2. | Accessory cells transfected with: | |
| | | a. | Nucleic acid encoding a SAg |
| | | b. | Nucleic acid encoding a tumor associated antigen |
| | | c. | Nucleic acid encoding a carbohydrate modifying enzyme |
| | | d. | Nucleic acid encoding an MHC molecule |
| | 3. | Recombinant viruses containing: | |
| | | a. | Nucleic acid encoding a SAg |
| | | b. | Nucleic acid encoding a tumor associated antigen |
| | | c. | Nucleic acid encoding a carbohydrate modifying enzyme |
| | | d. | Nucleic acid encoding an MHC molecule |

| B. | *In vivo immunization with: | |
|---|---|---|
| | 1. | Irradiated tumor cells. |
| | 2. | Tumor associated antigens. |
| | 3. | Irradiated tumor cells conjugated with DNP. |
| | 4. | Tumor associated antigen/SAg conjugate or fusion polypeptides. |
| | 5. | Naked nucleic or plasmid or phage displayed nucleic acid encoding a SAg or attached to |
| | | liposomes or albumin microspheres. |
| | 6. | Naked or plasmid or phage displayed nucleic acid encoding a SAg/tumor associated |
| | | antigen polypeptide conjugate. |
| | 7. | Tumor cells or accessory cells transfected with nucleic acids encoding structures given in |
| | | Table I Group IA, (pages 5 and 6) GM-CSF, IL-2 and other cytokines. (Berns, A J M. et al., |
| | | Human Gene Therapy 6: 347-368 (1995). |
| | 8. | Tumor cells transfected with nucleic acids encoding chemokines (T and NKT cell |
| | | chemoattractants) and granulocyte chemoattractants (C3a, C5a, MAP). |
| | 9. | SAg naked DNA fused or in mixture with DNA or structures non-transfected given in Table |
| | | 1 IA B and C (pages 5 and 6) |

| | |
|---|---|
| C. | Lymphoid cells from draining lymph nodes are harvested 3-21 days later and placed in |
| | tissue culture for further stimulation. They are divided into T cell, NKT cell and/T cell |
| | populations. Alternatively, T cells, NKT cells and/T cells are obtained from the peripheral |
| | blood and also placed in tissue culture for further stimulation. |
| D. | In vitro stimulation of T or NKT cell populations to produce tumor specific effector cells as |
| | described in “C” is carried out with STCT (“SAg transfected cell types”) or with constructs |
| | alone or applied to appropriate receptors on APCs. MHC class II APCs are used for |
| | presentation of SAg constructs. APCs expressing mannose, or CD1 or CD14 receptors are |
| | used for presentation of glycosylated SAg, SAg-LPS complexes, SAg-peptidoglycan |
| | complexes or SAg-glycosylceramide complexes. Isolated MHC class I, class II, mannose, |
| | CD1 or CD14 receptors immobilized on solid supports such as polystyrene plates may be |
| | used in place of APCs methods well known in the art. In this form they bind corresponding |
| | ligands in the constructs given above for presentation to T cells or NKT cells. STCT include |
| | tumor cells, accessory cells, antigen presenting cells, prokaryotic cells, autologous, |
| | allogeneic or xenogeneic cells lines and viruses. Accessory cells include the following: |
| | DCs, monocytes, macrophages, endothelial cells, fibroblasts and NK cells. These cells are |
| | transfected with nucleic acids encoding SAgs in combination with the nucleic acids given |
| | below. These nucleic acids may include the ISS sequence; SAg genes may be used with |
| | or without the ISS sequence. |

*In vivo immunization may be by various routes, e.g.,, i.d., i.m., or as organoids or in adjuvants proximate to regional lymph nodes e.g., inguinal lymph nodes. For tumor peptide genes an ISS is useful as is cotransfection of MHC class I genes. For SAg and tumor associated antigen genes, the ISS is useful.

[1172] TABLE V
Ex vivo Modes of Antigen Presentation to T Cells or NKT Cells to Produce Tumor Specific Effector Cells

| A. | Tumor Cells, Accessory Cells, Accessory Cell/Tumor Cell Hybrids, e.g., DC/Tumor Cell) Transfected with: | |
|---|---|---|
| | 1. | SAg-encoding nucleic acid |
| | 2. | SAg-encoding nucleic acid and tumor associated antigen nucleic acids (to include arrays of tumor |
| | | associated epitopes) |
| | 3. | SAg nucleic acid and MHC class I or II nucleic acids. |
| | 4. | SAg-encoding nucleic acid and co-stimulatory nucleic acids. |
| | 5. | SAg-encoding nucleic acid and adhesion molecule nucleic acids. |
| | 6. | SAg-encoding nucleic acid and α-galactosyltransferase synthetic nucleic acids or xenogeneic species |
| | | specific nucleic acids. |
| | 7. | SAg-encoding nucleic acid and chemoattractant nucleic acids |
| | 8. | SAg-encoding nucleic acid and glycosylceramide synthesis nucleic acids |
| | 9. | SAg nucleic acid and lipopolysaccharide synthesis nucleic acids |
| | 10. | SAg-encoding nucleic acid and microbial lipoprotein or polysaccharide or peptidoglycan membrane |
| | | or capsular synthesis nucleic acids |
| | 11. | SAg-encoding nucleic acid and SAg receptor nucleic acids |
| | 12. | SAg-encoding nucleic acid and CD1 receptor synthesis nucleic acids |
| | 13. | SAg-encoding nucleic acid and CD14 receptor synthesis nucleic acids |
| | 14. | SAg-encoding nucleic acid and SAg promoter and/or global regulator nucleic acids |
| | 15. | SAg-encoding nucleic acid and oncogene and/or transcription factor nucleic acids |
| | 16. | SAg-encoding nucleic acid and angiogenesis factor or receptor nucleic acids |
| | 17. | SAg-encoding nucleic acid and growth factor receptor nucleic acids |
| | 18. | SAg-encoding nucleic acid and cell cycle protein nucleic acids |
| | 19. | SAg-encoding nucleic acid and heat shock protein nucleic acids |
| | 20. | SAg-encoding nucleic acid and chemokine nucleic acids |
| | 21. | SAg-encoding nucleic acid and cytokine nucleic acids |
| | 22. | SAg-encoding nucleic acid and tumor suppressor nucleic acids |
| | 23. | SAg-encoding nucleic acid and antigen processing and trafficking nucleic acids |
| B. | Additional in vitro Stimulatory Agents (preferred receptor) | |
| | 1. | Tumor peptides (Class I or Class II) |
| | 2. | Tumor peptide-SAg conjugates or fusion proteins (Class I or Class II). |
| | 3. | Lipopolysaccharide-SAg conjugate (Class II or CD14) |
| | a. | arabinose |
| | b. | mycolic acid |
| | c. | teichoic acid |
| | d. | muramic acid (Staphylococcal cell wall glycoprotein) |
| | e. | mannan proteoglycans |
| | f. | chondroitin-sulfate |
| | 4. | Glycosylated SAgs. (Class II or mannose) |
| | 5. | SAg-glycosylceramide conjugates (class II or CD1) |
| | | a. GalCer conjugate |
| | | b. Gal conjugate |
| | 6. | SAg-proteosome conjugates |
| | 7. | SAg or glycosylated SAg or SAg-glycosylceramide conjugates or SAg-lipopolysaccharide or SAg- |
| | | peptidoglycan conjugates coupled to proteosomes |
| | 8. | SAg or glycosylated SAg or SAg-glycosylceramide conjugates or SAg-lipopolysaccharide conjugates |
| | | or SAg-peptidoglycan conjugates expressed on or coupled to liposomes |
| | 9. | Conjugates having a Superantigen component (polypeptide or nucleic acid) and a partner that |
| | | is either a single component or a conjugate of 2 or more components (protein, carbohydrate, lipid |
| | | DNA) as indicated below. |

| Superantigen | | |
|---|---|---|
| (Protein or DNA) | | Partner (Single Component or Conjugate) |
| 1. | | DNA coding sequence |
| 2. | | Polypeptide |
| 3. | | Nucleic acid |
| 4. | | Tumor associated Peptide |
| 5. | | Tumor Antigen-MHC protein |
| 6. | | LPS |
| 7. | | Lipoarabinomannan |
| 8. | | Ganglioside |
| 9. | | Glycosphingolipid |
| 10. | | Ganglioside-CD1 receptor |
| 11. | | Glycosphingolipid-CD1 receptor |
| 12. | | Glycosylceramide (e.g., Gal-Cer) |
| 13. | | GalCer-CD1 receptor |
| 14. | | Gal |
| 15. | | Arg-Gly-Asp or Asn-Gly-Arg |
| 16. | | iNOS |
| 17. | | Gb2 or Gb3 or Gb4 |
| 18. | | (Gb2 or Gb3 or Gb4)-CD1 receptor |
| 19. | | -GPI-(Gb2 or Gb3 or Gb4) |
| 20. | | -GPI-(Gb2 or Gb3 or Gb4)-CD1 receptor |
| 21. | | Vero toxin |
| 22. | | Vero toxin A or B Subunit |
| 23. | | IFNα receptor peptide homologous to VT |
| 24. | | CD 19 peptide homologous to VT |
| 25. | | LDL, VLDL, HDL, IDL |
| 26. | | Apolipoproteins (e.g., Lp(a), apoB-100, apoB-48, apoE) |
| 27. | | OxyLDL, oxyLDL mimics, (e.g., 7β-hydroperoxycholesterol, 7β-hydroxycholesterol, 7- |
| | | ketocholesterol, 5α-6α-epoxycholesterol, 7β-hydroperoxy-choles-5-en-3 β-ol, 4-hydroxynonenal |
| | | (4-HNE), 9-HODE, 13-HODE and cholesterol-9-HODE) |
| 28. | | OxyLDL by products (e.g. lysolecithin, lysophosphatidylcholine, malondialdehyde, 4- |
| | | hydroxynonenal) |
| 29. | | LDL & oxyLDL receptors (e.g., LDL oxyLDL, acetyl-LDL, VLDL, LRP, CD36, SREC, LOX-1, |
| | | macrophage scavenger receptors) |
| 30. | | phytosphingosine, -GPI-phytosphinosine |
| 31. | | tumor associated lipid antigens |
| 32. | | glycolipid, proteolipid, glycosphingolipid, sphingolipid with inositolphosphate-containing head |
| | | groups, phytoglycolipids, mycoglycolipids, -GPI-sphingosines or GPI-lipids |
| 33. | | sphingolipids with inositolphosphate-containing head groups having the general structure: |
| | | ceramide-P-myoinositol-X with X referring to polar substituents comprising ceramide-p-inositol- |
| | | mannose, inositol-1-P-(6)mannose(αl,2inositol-1P-(1)ceramide, (inositol-P)2-ceramide, inositol-P- |
| | | inositol-P-ceramide, inositol-P-inositol-P-ceramide. |
| 34. | | tumor associated glycan antigens consisting of peptidoglycans or glycan phosphotidyinositol (GPI) |
| | | structures |
| C. | STCT or SAg-tumor peptide conjugates are incubated with in vivo immunized T cells or NKT cells for 2-4 | |
| | days and then with IL-2 for 2-5 days. | |
| D. | The tumor specific effector cells are then harvested and injected in doses of 10¹⁰-10¹² every 3-7 days for 1-6 | |
| | treatments. | |
| E. | Viruses are transfected into tumor cells, accessory cells, antigen presenting cells, allogeneic or xenogeneic | |
| | cells. They are pre-programmed with DNA for SAgs alone or in combination with genes given in D. They | |
| | may also utilize the host genome to produce a new gene product as for example the host -galactosyltransferase. | |
| | Viruses may include the following: | |
| | 1. | Adenoviruses. |
| | 2. | Vaccinia virus. |
| | 3. | Equine encephalitis virus. |
| | 4. | Influenza virus. |

| | |
|---|---|
| F. | In an additional method, tumor associated antigens are bound to MHC class I positive cells and used to activate |
| | T cells. SAg-lipopolysaccharide complexes and SAg-glycosylceramide complexes are bound to CD1 or class |
| | II receptors on APCs. In addition, SAg-lipopolysaccharide complexes or SAg-glycosylceramide complexes |
| | are presented bound to class II positive APCs. Alternatively, unbound tumor associated antigen/SAg. |
| | conjugates or fusion products are added at a 0.1 to 200 mg/ml dose for 2 days. This is followed by STCT |
| | incubation or by native or mutant SAg treatment for 2 days. |

[1173] For comparative analysis, peripheral blood lymphocytes (PBL) are obtained from patients the same day as the lymph node harvest. PBL are isolated by Ficoll-Hypaque gradients from 60-ml of heparinized blood samples. The PBL are placed in culture utilizing 24-well tissue culture plates at the same cell density as lymph node cells. PBL are harvested at maximal cell density and characterized by phenotype analysis and cytotoxicity. T cells, NKT cells, and NK cells are isolated by well known methods described in the art (Colligan, J E et al., eds, Current Protocols in Immunology, John Wiley, New York, 1996).

[1174] PBL are separated by Ficoll/hypaque sedimentation. Cells are recovered from the interface, washed in PBS, and pelleted. Peripheral blood mononuclear cells enriched for MHC class I molecules or MHC class II molecules are used to bind tumor associated antigens or tumor associated antigen/SAg conjugates for in vitro or in vivo immunization.

[1175] Cryopreserved groups of autologous PBMCs are thawed, washed twice in PBS, resuspended at 5 to 8×10⁶ cells/ml in CM and pulsed with 1 mg/ml peptide in 15 ml conical tubes (5 ml/tube) for 3 hours at 37° C. These PBMC stimulators are then irradiated at 3000 rads, washed once in PBS, and added to the responder cells at responder stimulator ratios ranging between 1:3 and 1:19.

[1176] Tumor infiltrating lymphocytes are isolated from fresh surgical biopsies. Briefly, tumor tissues are minced into 1-mm3 pieces that are then dissociated into single cell suspensions in Dulbecco's modified minimum essential medium (Gibco; Grand Island, N.Y.) supplemented with 10% heat-inactivated human AB serum (NABI, Miami, Fla.), 0.05% collagenase (type 4; Sigma Chemical Co., St. Louis, Mo.), and 0.002% DNase (type 1; Sigma) on a magnetic stirrer for 1 hour. Subsequently, the tissue digests are washed and passed through a nylon mesh and tumor infiltrating lymphocytes and tumor cells are separated on discontinuous (75%/100%) Ficoll/Hypaque gradients.

[1177] Lymph node lymphocytes are obtained by mechanical dissociation of tissues, followed by washing in medium and centrifugation on Ficoll/Hypaque gradient [Newell K A, et al., Proc. Natl. Acad. Sci. USA, 88:1074 (1991)]. Cryopreserved suspensions of tumor cells/tumor infiltrating lymphocytes are defrosted, washed, and separated by allowing tumor cells to adhere to the surface of plastic wells. The recovered non-adherent tumor infiltrating lymphocytes are transferred to 6-well plates and cultured in serum-free AJM-V medium (Gibco) supplemented with 6,000 U/ml of IL-2 (Cetus-Chiron, Emeryville, Calif.) for 8 days. Tumor cells are cultured as adherent monolayers in Dulbecco's modified Eagle's medium (DMEM, Gibco) supplemented with 10% (v/v) of fetal calf serum. Any activated lymphocytes can be used in the method given above. In a preferred embodiment, lymphocytes expressing a predominant TCR V phenotype in tumor tissue or peripheral blood before or after treatment are isolated and expanded by standard procedures.

[1178] Antibodies to various TCR Vβ subsets are immobilized on inert solid supports and incubated with blood cells and/or tissue cells to include bone marrow and peripheral blood or lymphoid tissue cells and tumor infiltrating lymphocytes.

[1179] The bound T cells are eluted with various buffers. Suitable biocompatible inert supports include polystyrene, polyacrylamide, nylon, silica, and charcoal as well as others known in the art. The supports are derivatized for covalent binding of antibodies with agents well known in the art including heterobifunctional compounds, carbodiimide, and glutaraldehyde. The enriched population of V-bearing T cells is then used for in vitro immunization with a SAg in native or mutant form capable of activating the dominant TCR Vβ bearing lymphocytes. IL-2 is used to further expand the cell population as described above.

[1180] Effector lymphocytes obtained after in vivo sensitization are stimulated in vitro with tumor associated antigens bound to irradiated PBMC (which act as stimulator cells) for 8-72 hours. DCs, macrophages, or other class I-bearing cells are used to present the tumor associated antigens. The T cells are then analyzed for TCR Vβ and/or CD44 expression. An STCT expressing a SAg is then added to the culture (1 picogram to 10 microgram). If a given V predominance is noted after antigen stimulation, then an STCT or SAg known for its ability to specifically stimulate that Vβ subset is selected for use in activation. Culture proceeds for 18-72 hours. The TCR Vβ and CD44 profile of stimulated T cells are then rechecked. IL-2 (12-25 IU) and/or anti-CTLA-4 antibodies are added for an additional 8-72 hours after which the cells are harvested for use. The optimal timing of STCT introduction after tumor antigen stimulation is between 3 and 14 days.

[1181] Antigen-presenting cells (APCs) of all kinds such as DCs, B cells or macrophages with appropriate MHC class II molecule binding sites for soluble SAgs are used or the SAgs are presented alone or in immobilized form without APCs. Optionally, STCTs are used without APCs. Before IL-2 administration, effector cells are re-stimulated weekly by washing and replating in 24 well plates at a concentration of 2.5×10⁵ cells/ml in CM. This is continued for 3-10 cycles until enough cells are available for IL-2 expansion. T cells are cloned 7 days after the several cycles of stimulation in 96-well round bottom plates at 0.3 cells/well with 5×10⁴ stimulator tumor antigen-PBMC, SAg, or STCT and 25-50U recombinant IL-2 in a volume of 200 ml.

[1182] For long term growth, clones are transferred to 24 well plates and 10⁶ cells/well and stimulated weekly with SAg or STCT plus optimally 5×10⁵ tumor associated antigen-PBMC and 25-50U/ml of IL-2. After clones grow to greater than 2×10⁶ cells, the clones are maintained by culturing with STCT only for 48 hours, washing to remove STCT, and replating in fresh media for 5-7 days with 25-50 U/ml IL-2.

[1183] The initial incubation is with the selected tumor associated antigen such as MART-1 for 1-3 days with the latter reagents followed by V profiling and re-stimulation with SAg by methods given above. The MART-1 is presented attached to HLA-A1⁺ cells of PBMC. Cytotoxic activity is tested after the first and/or second rounds of sequential stimulation with tumor associated antigen and SAg given below.

[1184] The tumor-specific effector T cell population is immortalized as tumor specific T cell hybridomas. These hybridomas are generated by immunization in vitro of human T cells as described herein. The expanded T cells are then fused to a thymoma and cloned by limiting dilution or other methods well known in the art. Cells are cultured in complete tumor medium composed of Eagle's minimal essential medium supplemented with 10 mM 2-mercaptoethanol, 10% fetal calf serum, 10% Mishell-Dutton Nutrient cocktail, 100 U/ml penicillin G, and 200 mg/ml streptomycin sulfate. Other well known culture media can also be used.

[1185] For SAg immunization in vitro, various antigen presenting cells are used including MHC class II-positive T cells as well as those expressing CD1. Purified MHC class II or CD1 molecules alone or immobilized are substituted for APCs in some cases. Moreover, T cells are activated by some SAgs without APCs when presented to T cells in immobilized form or in the presence of various cytokines such as IL-1, IL-2, IL-4, or IL-6 or xenogeneic antigens. Various costimulants such as B7-1 and B7-2, adhesion molecules such as ICAM-1 and VCAM-1, or GalCer are used together with SAgs and MHC class II positive APCs or immobilized MHC class II peptides to augment the T cell or NKT cell response.

[1186] Tumor associated antigen immunization is also involved in the binding of peptides to MHC class I bearing APCs of multiple origins. Various cytokines including, but not limited to, IL-1, IL-2, IL-4, IL-12, or LPS are used in vitro or in vivo to expand the antigen specific clone of T cells and avert the development of T cell anergy.

[1187] Specialized Forms of Tumor Specific Effector Cells and Hybridomas

[1188] Tumor specific T or NKT cells with TCR V and/or CD44 selectivity are produced by transfecting uncommitted stem cells with nucleic acids encoding particular TCR V chains. Likewise, a T cell clone overexpressing CD44 is produced by transfecting T cells with nucleic acids encoding CD44. A hybridoma expressing a tumor associated antigen with a dominant TCR V phenotype or CD44 expression is produced in this way. Such a T cell hybridoma or cell line is stimulated exogenously by a SAg or a SAg mutant with a TCR V or CD44 selectivity corresponding to that expressed predominantly by the T cell hybridoma. The result is a clone of tumor specific T cells capable of being expanded by exposure to SAg in vitro or in vivo.

[1189] CD44 expression is induced in a T cell, NKT cell or TCR/T cell population after activation in vitro or in vivo with SAgs alone or together with any of the T or NKT cell stimulating constructs and methods described herein. The in vivo and in vitro activation steps and immunization protocols are given in Examples 7, 15, 16. 18-23. The CD44 positive T cell population exhibits upregulated primary adhesion properties and is capable of effectively trafficking and homing to tumor cells in vivo and particularly to sites of SAg (in native or nucleic acid form) injection i.e. tumor Nucleic acids encoding CD44 or a carbohydrate modifying agent will induce CD44 expression on the T cell surface. A preferred in vivo method of use involves intratumoral injection of SAg DNA into tumor sites which induces expression of CD44 on T cells resulting in enhanced T cell trafficking to the site of SAg administration.

[1190] T cells are genetically engineered to overexpress CD44 after SAg stimulation. This is accomplished by transfection of T cells or NKT cells with nucleic acid encoding CD44 as well as nucleic acids encoding glycosyltransferases. This results in the overexpression of CD44 upregulation of the adhesive properties of CD44. Such CD44 enriched clones are harvested after SAg stimulation, enriched, and administered for adoptive immunotherapy of cancer (Examples 6, 7, 15, 16, 18-23).

[1191] Additionally, T or NKT cell clones or hybridomas are produced which express a chimeric TCR consisting of an invariant chain with specificity for GalCer or and a chain that binds a SAg. The V region which is specific for the SAg is overexpressed on the TCR permitting greater responsiveness to exogenous SAg. This chimeric TCR recognizes and is stimulated by an exogenous SAg with a TCR V selectivity corresponding to the predominant TCR V phenotype of the T or NKT cell. Such T or NKT cell lines are cloned and hybridomas produced by methods well known in the art.(Current Protocols in Immunology, pp. 7.21.-7.21.9 John Wiley, New York, 1991) The expanded clone of tumor specific T cells produced in this way is useful for adoptive immunotherapy of cancer by methods given in Examples 7. 15, 16, 18-23.

[1192] T cell clones are produced due to asynchronous TCR V locus rearrangements at low but significant frequency in which both TCR V segments are part of two functional TCRs. Such clones are produced from uncommitted stem cells in which nucleic acid encoding two chains are transfected, one having specificity for a tumor associated antigen and another having SAg specificity. Hence, a clone of T cells with dual V TCR expression is produced which is capable of reacting with a tumor specific and a SAg. This clone is expanded by binding either or both ligands. These expanded clones consisting of tumor specific effector T cells are used for adoptive immunotherapy of cancer by protocols given in Examples 7, 15, 16, 18-23).

[1193] T cells or NKT cells clones or hybridomas expressing TCR Vα and Vβ chains with specificity for GalCer and SAg, respectively, are produced by fusion of NKT cell DNA encoding the GalCer and SAg receptors with DNA from an appropriate thymoma. This GalCer receptor and SAg receptors are expressed on the α and β chains of the TCR, respectively. Upon exposure to GalCer or SAg, these cells are further activated to express CD44 which enhances their homing and adhesive properties. NKT or T cells expressing high levels of IFN, GM-CSF, and IL-10 are selected and cloned. The clone of T cells producing IFN and expressing GalCer, SAg and CD44 is then expanded and immortalized. With its properties of tumor recognition, SAg and glycosylceramide activation, IFN production and effective in vivo trafficking, this T or NKT effector cell population is preferred for adoptive immunotherapy of cancer by methods given in Examples 7, 15, 16, 18-23).

[1194] Additional measures to avert apoptosis and augment proliferation capacity in SAg activated T cells include the use of anti-CD28 antibodies and inhibition of CTLA-4 on T cells. CTLA-4 on T cells is blocked by specific antibodies or fragments.

[1195] Alternatively, a T cell clone is used in which CTLA-4 is genetically deleted. When stimulated by

[1196] SAg, these cells proliferate to a greater extent compared to SAg alone. Cell populations in which CTLA-4 is deleted or blocked are selected to have a predominant V bearing lymphocyte population that is activated after in vivo or ex vivo tumor associated antigen stimulation. After CTLA-4 deletion or blockade, the appropriate SAg with Vβ selectivity is chosen to expand this population. To avert uncontrolled proliferation in vivo, the thymidine kinase gene of the HSV is co-transfected to enable elimination of these cells in vivo if desired.

[1197] Measures to produce an effector T cell population with an overexpressed TCR V and/or V chains specific for a given SAg involve the transfection of nucleic acids encoding the desired V or V regions into T cells as in Example 1. To lower the activation threshold of the T cell or NKT cells to SAg or SAg-tumor peptide-MHC or CD1, the T cell or NKT cells are transfected with nucleic acid encoding a tyrosine kinase or other signal transduction initiating molecules which can dimerize in the membrane with the TCR tyrosine kinases thereby lowering the threshold for activating the signal transduction pathway. The deletion of the signal transduction inhibitory region of the TCR to produce sustained signal transduction is done by site directed mutagenesis as in Example 24.

[1198] The T cell population used for adoptive immunotherapy after stimulation with SAg are enriched for interferon production using an IFN-gamma capture assay as described by Becker et. al. Nature Med. 7: 1159-1162 (2001). Such enriched IFN gamma secreting T cells have been shown to be cytolytic and optimal for adoptive transfer. (See Example 66 for methods of production and use of the IFN gamma secreting T cell in adoptive immunotherapy of cancer).

[1199] In an additional embodiment, to avert apoptosis of T cells after ex vivo superantigen induced stimulation, they are coincubated with cytokines IL-2, IL-4, IL-7 and IL-15 on in vitro. IL-4 and IL-15 appears to exceed IL-2 and IL-7 in their T cell sparing effects. The T cell-cytokine cultlure conditions are given in Vella A T et al., Proc Natl Acad Sci 95:3810-5 (1998).

[1200] In an additional embodiment. CD25 positive T cells are also activated by SEs in vitro and in vivo (Rosendahl A et al., Infect Immun 5:5118-24 (1997) and inhibit the activity of the tumor cytotoxic T cells. Depletion of CD25+ T cells with a single injection of 0.4 mg of anti-CD25-depleting antibody resulted in an anti-tumor effect (Sutmuller R P M et al., J. Exp. Med. 194: 823-832 (2001). Accordingly, T cells for use in adoptive therapy are depleted of CD25+ T cells in vitro using anti-CD25 antibodies in quantity sufficient to reduce the CD25 population to undetectable levels. These antibodies are introduced 5 to 72 hours after stimulation to the T cells with superantigen. The CD25 depeted T cell population is then expanded in IL-2 (and/or other cytokines shown to be optimal for sparing T cells from apoptosis as given in Vella A T et al., supra and previous patents and patent application in this line), collected and administered to the patient.

### EXAMPLE 8

### Prevention of Anergy in T or NKT Tumor Specific Effector Cells

[1201] The SAg stimulated tumor specific effector T cells used for adoptive immunotherapy of cancer may not function when infused unless measures are taken to prevent T cell anergy or activation-induced cell death (AICD) by interdicting the Fas mediated pathway. The Fas ligand (FasL) has been identified as a type II transmembrane polypeptide of the TNF family. These two related receptor-ligand systems signal apoptosis through closely related but distinct pathways. T cell phenotypes that have diminished expression of Fas or FasL show delayed anergy induction and shortened periods of non-reactivity compared to Fas-expressing cells. Activation-induced cell death (AICD) induced by SAgs in vitro or in vivo is averted using Fas-deficient T cells, including those with down-regulated Fas or FasL receptors as well as those with masked or blocked Fas receptors. A Fas-IgG fusion protein is added during the SAg activation phase to prevent AICD or anergy induction. Measures such as those above (or by treating with anti-CTLA-4 antibodies or activation of CD28 before, during, or after STCT stimulation) protect T cells from anergy or AICD. In this way, these manipulations prolong T cell survival in vitro and enhance tumoricidal activity in vivo after the T cells are activated by tumor associated antigen plus SAg or tumor associated antigen-SAg conjugates in vitro.

[1202] SAg nucleotide alone or fused to tumor peptide nucleotide may be further fused with an antisense nucleotide capable of inhibiting the apoptosis pathway.

[1203] When expressed in T cells, this combination of genes would promote the generation of tumor specific effector T cells which would be resistant to AICD. Oligonucleotide antisense molecules that inhibit key steps leading to apoptosis may be fused to SAg DNA in order to prevent the T cells from undergoing AICD. SAg DNA may also be fused with the multi-drug resistance (MDR) gene to make the T cells refractory to chemotherapeutic agents and sensitive to anti-apoptosis drugs. Certain drugs or radiation may be used together with SAg DNA for additive or synergistic inhibition of the apoptosis pathway in the doubly or multiply transfected T cells.

[1204] SAg DNA may also be linked operatively to promoter genes such as those inducible by corticosteroids or heavy metals (e.g., the metallothionein promoter) and regulatory DNA sequences that act as T cell on/off sensors responsive to exogenous cytokines, inflammatory stimuli and changing external conditions such as oxygen tension and pH. A particular advantage of SAg DNA is that its expression will promote V receptor downregulation and internalization so that these receptors are unavailable to exogenous SAg. SAg DNA is modified in several ways to introduce protein binding sites for key transcriptional elements which may inhibit apoptosis. Insertion of such sites at the bending domains of SAg oligonucleotides renders them capable of inducing key TH-1 cytokines and cell proliferation while averting AICD.

[1205] SAg DNA is also capable of reversing the T cell anergy and signaling defect which may be localized to the chain in cancer patients. This is accomplished by providing transcriptional binding sites on the SAg DNA which bypass the conventional chain activating signals and the pathway to IFN and IL-2 production. In the same way, SAg DNA also bypasses the defective signal by activating a complex that contains STAT-1 which binds a GAS-like palindromic sequence located in the IFN response region of the FCRI gene. Such anergy in T cells may also be reversed by alternate cytoplasmic tails that are activated by SAg binding to the TCR Vα and Vβ chains. Moreover, nucleic acid encoding Protein A and especially domain D (that binds to the Ig VH3 region) may be fused to SAg DNA in order to bring about activation of the IL-2 and IFN genes that resulting in T cell proliferation and IFN production coupled with up-regulated surface receptors for the Ig VH3 domain.

[1206] Anergy in SAg-activated tumor-specific T or NKT effector cells (or hybridomas) is known to be averted by in vitro or in vivo co-administration of IL-2, IL-1, LPS and tumor specific peptides specifically interfere with SAg driven anergy.

[1207] Methods and doses for use of these agents with SAg activated T or NKT cells are given in Examples 7, 15, 16, 18-23.

[1208] Tumor specific T or NKT effector cells or hybridomas prepared by various methods described above are administered according to the adoptive therapy protocol of Examples 7, 15, 16, 18-23 (the preferred method). The experimental tumor models and human cancers for which the anti-cancer efficacy of these cells can be demonstrated are provided in Example 16.

### EXAMPLE 9

### Reactivation of Anergized Tumor-Specific T or NKT Cells by SAg and SAg Receptors

[1209] Preferred tumor-specific effector cells for adoptive immunotherapy of cancer are autologous T cells. However, in the course of tumor growth, T cells become anergized to the host's own tumor and are incapable of an adequate immune response to the tumor. Dampened TCR-triggered responses are caused by suppression of effector molecules that couple cell surface receptors to early and late intracellular signaling events. For example, basal and induced tyrosine phosphorylation of many signaling proteins is reduced due to deficits at multiple points, including the inositol phosphatase pathway. This down-regulates cytokine production and decreases nuclear transcription factors of TH1 helper cells.

[1210] Two functionally distinct signal transduction pathways are coupled to the TCR. Native or mutant SAgs activate anergic T cells via an alternate pathway without the conventional increases in Ca++ mobilization or detectable phosphatidylinositol hydrolysis that follow ligation of the TCR by peptide/MHC complexes. Native, mutant or derivatized SAgs are administered to stimulate anergized T and/or NKT cells to become tumor-specific effector cells now fully reactive against tumors. Such cells are-used also in adoptive immunotherapy of cancer as described in Examples 7, 15, 16, 18-23. Nucleic acid constructs comprising DNA encoding SAg and SAg receptor are provided to reverse T cell anergy in cancer patients.

[1211] Anergic T (or NKT) cells transfected with DNA encoding a SAg receptor express the receptor on the cell surface. Binding of exogenous SAg to this receptor generates T cell activating signals, so that the activated T cells can be used for adoptive immunotherapy.

[1212] DNA encoding a SAg peptide is transfected into cancer patients' anergized T and/or NKT cells. These DNA constructs also contain the ISS (described above). The T and/or NKT cell transfectants have revitalized proliferative activity when stimulated by tumor-specific antigen and exogenous SAg. The cells are used for adoptive immunotherapy of cancer (Examples 7, 15,16, 18-23).

[1213] Anergic T cells from cancer patients are transfected in vivo or in vitro, resulting in a population of tumor reactive effector T cells in vivo or ex vivo. The ex vivo transfected T cells are used for adoptive immune therapy as described in Example 15, 16, 18-23. In the case where SAg receptor is expressed by transfected T cells, these cells are activated by locally or systemically by SAgs to result in tumor-specific effector cells.

[1214] Additional manipulations that assist in restoring responsiveness to anergic T cells include removal of the (T or NKT) cells from the immunosuppressive microenvironment and transfer into tissue culture for a short period before stimulation with SAg. Furthermore, defective signaling in patient T or NKT cells may be reconstituted by transfection with DNA encoding CD3-2 or fyn that is either in a single construct with, or cotransfected with, DNA encoding SAg and/or SAg receptor. Now, surface activation of the SAg receptor triggers CD3− signaling and T cell proliferation.

[1215] SAg activation of a T cell surface ganglioside (such as GD3) is also used to reverse T cell anergy in cancer patients. SAg coupled to GalCer, lipopolysaccharides or proteosomes are even more effective in activating such anergized T cells. Coordinate activation of CD69 with phorbol esters in combination with SAg stimulation also reverses T cell anergy.

### EXAMPLE 10

### Tumor Specific Effector T or NKT Cells as Lymphoid Organoids

[1216] Tumor specific T and/or NKT effector cells (or hybridomas with such cells) are prepared ex vivo in the form of a lymphoid organoid and implanted into tumor-bearing hosts. The organoid consists of the tumor specific lymphocytes either activated by SAgs, transfected to express SAg alone or in combination with the other proteins or anti-tumor moieties described herein. The cells are encased in semi-permeable membranes that allow for their progressive entry into the blood and lymphatics after implantation into the host. Such organoids are implanted preferentially at sites adjacent to lymphatics or blood vessels that drain organs or regions of known tumor involvement. However, they may also be implanted subcutaneously, intraperitoneally in addition to intra-tumorally or adjacent to a tumor site. The advantage of the organoid is that it continuously provides proliferating tumor-specific effector cells that recognize traffic to tumor sites in a physiological manner. This approach avoids negative selection, functional deficiencies and storage problems associated with long term cultured cells.

[1217] Organoids are encased in macrocapsules, sheaths, rods, discs, or spherical dispersions or microcapsules. Microcapsules are made of hydrogels such as polysaccharide alginate that are optionally coated with polyanions and again with alginate. Macrocapsule and vascular devices consists of acrylonitrile-vinyl chloride copolymers or cellulose nitrate membranes. In one approach, scaffolds composed of synthetic polymers serve as cell transplant devices. The polymers are degradable or non-degradable materials that disappear from the body after they perform their function to obviate concerns about long-term biocompatibility.

[1218] These devices serve as structural and functional tissue units by the transplanted cells. The open system implants are designed so that the polymer scaffold guides cell organization and growth and allows diffusion of nutrients and cells. The cell polymer matrix is pre-vascularized or becomes vascularized as the cell mass expands after implantation. Vascularization is induced naturally by the host or artificially by secretion of angiogenic factors from host cells. Optionally, the angiogenic proteins are genetically engineered into the host T cells in vitro before implantation or in vivo before or after implantation.

[1219] To maintain or facilitate targeting of the cells to tumors or involved organs, the lymphocytes are transfected with DNA encoding polypeptides that enhance homing and trafficking ability to the sites of tumor burden (e.g., brain, liver, lung). The organoid lymphocytes express no CTLA so that they may proliferate (in vitro and in vivo) without the need for exogenous IL2. Alternatively, cells are transformed to express herpes simplex virus thymidine kinase, making them susceptible to killing by gancyclovir. This curtails uncontrolled proliferation caused by the CTLA-4 deletion (or inhibition). Exogenous control of antitumor activity is achieved through the use of inducible promoters, such as those responsive corticosteroids or metals.

### EXAMPLE 11

### Tumor Specific Effector Cells or Tumor Cells Expressing Protein A, Protein A Domains and/or Angiostatin

[1220] It is desirable to express Fc receptors (FcR) or Ig VH₃ domains on tumor cells to promote binding by immunoglobulins and enhance damage by antibody dependent cellular cytotoxicity. By introducing Staphylococcal Protein A, or its domains A-D into tumor cells which overexpress FcR and VH3 the tumor cells bind immunoglobulins (including those with α-gal specificity). Signaling of T cells occurs via high affinity binding to FcR (FcRI) of protein A-IgG complexes; such binding bypasses the CD3− blockade in tumor bearing patients. These transfected tumor cells are useful as a vaccine. Likewise, nucleic acids encoding protein A and its domains A-D are transfected into partially or fully anergized T or NKT cells of cancer patients. Exogenous immunoglobulins stimulate the generation of tumor-specific effector T or NKT cells which are used in adoptive immunotherapy (Examples 7, 15, 16, 18-23).

[1221] DNA encoding Staphylococcal protein A and its domain D are co-transfected into these tumor cells resulting in the joint surface expression of: (1) protein A and FcR to which it binds and/or (2) domain D and Ig VH3 to which it binds.

[1222] When DNA encoding protein A or domain D, fused to a signal sequences that route and anchor the protein A peptide to the tumor cell surface, is introduced into tumor cells, such tumor cells are excellent targets for parenterally administered SAg polypeptides (particularly those for which no natural antibodies exist). Tumor cells expressing protein A and domain D and also expressing FcRs on the cell surface, have heightened sensitivity to complement mediated lysis.

[1223] Tumor cells cotransfected to express protein A and Gal (by introduction of the appropriate glycosyltransferase) are capable of reacting with natural anti-Gal antibodies, Ig Fc fragments and Ig VH3 domains, which stimulate an enhanced tumoricidal response.

[1224] Angiostatin is a circulating angiogenesis inhibitor which is 38-kDa internal fragment of (mouse) plasminogen that contains the first four disulfide-linked kringle domains. In vivo, angiostatin suppresses neovascularization in several traditional assays (chick chorioallantoic membrane assay and mouse corneal assay). Proteases released by tumor cells cleave circulating plasminogen to generate angiostatin. Metalloelastase produced by tumor infiltrating macrophages generated angiostatin production by murine Lewis lung carcinoma. In the present invention, nucleic acid encoding angiostatin (Cao Y et al., J. Clin. Invest. 101: 1055-1063, (1998)) are cotransfected into tumor cells with nucleic acid encoding SAg (as in Example 1). The tumor cell cotransfectants express and secrete SAg and angiostatin. Such cells are used directly as a preventative vaccine (Example 8) or as a therapeutic vaccine to treat established tumor including micrometastases. Methods for using these cells in vivo are in Examples 7, 12, 16, 18-23.

[1225] In addition, tumor cells are cotransfected to express angiostatin and protein A (and/or its domains). Any nucleic acid construct shown in Table I may also be used in combination to transfect tumor cells together with protein A, its domains and angiostatin.

### EXAMPLE 12

### SAg Receptor

[1226] Colon carcinoma is used as the tissue source for the SEB receptor. Mixtures of different detergents at low concentrations are used. The protocol for screening detergents for solubilization of MAChRs is readily adaptable to other receptor types. The membranes are suspended for 5-10 min at pH 7.5, 20 mM Tris-HCl, pH 7.5, or 20 mM sodium phosphate, pH 7.0-7.5. For screening purposes it is unnecessary to add complex proteolysis inhibitor cocktails. The presence of EDTA (1 mM) to inhibit calcium-activated proteases and of PMSF or benzamidine (0.1 mM) to inhibit serine proteases is sufficient. Mg2++ (2 mM) is added. The membranes are prelabelled with a radioligand in the presence and absence of a suitable unlabelled ligand to determine the total and non-specific binding. Non-specific binding is subtracted from total binding to obtain the specific binding. A high enough concentration of labeled ligand to saturate the binding site (10×Kd) is used, so that the binding capacity is measured. The unlabelled ligand is used at a concentration of 1000×Kd. The normal criteria for specific binding must be fulfilled. The incubation is sufficient to reach equilibrium. Prelabelled membrane suspension (0.5 ml) is added to a series of centrifuge tubes a 4° C. An equal volume of detergent solution in the same buffer is added to obtain a series of different final detergent concentrations, e.g., 0, 0.1, 0.2, 0.5, 1.0, 2.0% w/v.

[1227] The tubes are mixed and incubated for 60 min. at 4° C. Solubilization is assisted by stirring or mixing, e.g., with a rotating-wheel end-over-end mixer. The tubes are centrifuged for 30-60 min at 100,000×g for 60 min. For screening, a lower speed spin, e.g., 10,000×g for 5 min (such as in a microfuge) is acceptable. Supernatant, 0.2 ml, is applied to a 2 ml column of Sephadex G50 equilibrated with the selected detergent at 0.1%. When the sample has run in, 2 x 0.2 ml of detergent-buffer is applied and then the void volume fraction is eluted with 0.5 ml of detergent buffer. This procedure is carried out, the remaining material is removed, and 10 ml of aqueous scintillation cocktail is added and the radioactivity counted. Sephadex G50 is substituted for G50F for hydrophilic ligands, which do not partition into detergent micelles. This gives a more rapid separation. The recovery of specifically bound ligand is calculated in absolute terms:

bound ligand=(dpm (total)−dpm (non-spec.)×5/(2220×spec. act) pmol/ml

[1228] An aliquot of the pellets is resuspended and counted to calculate recovery of unsolubilized receptors. The concentration of protein in the solubilized supernatant is measured, for example, by measuring UV absorbance at 280 nm against a detergent-buffer blank. (If necessary, the supernatant is diluted to get the absorbance on scale.) Protein concentration in the solution is approximately equal to the absorbance at 280 nm.

[1229] Alternatively, the Lowry method is used. The above steps are repeated without first prelabeling the receptors in the membrane. Instead, the solubilized supernatantis incubated in the absence and presence of labeled ligand. Again, concentration of the labeled ligand is used that saturates the binding sites. Incubation is carried out for 2 h at 4° C., and the binding is assayed by gel filtration as above. The pellet is resuspended and assayed for residual binding to check overall recovery. The molecular size of the receptors in solubilized preparations is estimated by a combination of gel filtration chromatography and sucrose density gradient centrifugation in H2O and D2O. Affinity chromatography is the principal method use for purification of all of the receptors, combined with gel permeation HPLC, and ion exchange. SDS PAGE is carried out on the final product. Affinity chromatography is carried out using immobilized SEB, and the column is eluted with acid buffer or different concentrations and ionic strengths of eluting buffer.

[1230] Determination of amino-acid and oligonucleotide sequences of SAg receptors

[1231] Receptor material is eluted from the SDS-PAGE, and the N-terminal amino acid sequence is determined. When free amino termini are not available, the purified receptor material must be subjected to partial hydrolysis. The specific cleavage of peptide bonds is performed with endoproteases, such as V8 protease or trypsin, or with chemicals such as cyanogen bromide(CNBR). The resulting peptides are separated by SDS-PAGE when they are over residues or by reverse phase HPLC. The peptides thus analyzed are subjected to amino-acid sequence analysis with a gas phase or solid phase sequencer.

[1232] Antibodies are raised against the peptides, and the resultant antibodies used to confirm that the peptide is a part of the receptor by immunoprecipitation or Western blot.

[1233] To determine the full sequence of the receptor gene, oligodeoxynucleotide probes synthesized on the basis of peptide sequences are used to screen an appropriate cDNA library. Either a mixture of relatively short oligonucleotides with all possible sequences or a relatively short oligonucleotides with a sequence based on codon usage frequency is used. Genomic libraries as well as cDNA libraries are screened to obtain genes for receptors and to deduce their amino acid sequence. The amino acid sequence deduced from the nucleotide sequence is compared to the known sequences of other receptors. Among the useful structural information derived from the sequence analysis is the hydropathy profile. The presence of hydrophobic domains with a length of approximately 20 amino acids residues suggests that the regions are transmembrane segments. Genomic or cDNA clones ligated into expression vectors are used to transform suitable cell lines.

[1234] Alternatively, mRNA transcribed from these clones is injected into recipient cells such as Xenopus oocytes. The expression of receptors in these cells is confirmed by measuring ligand binding, reactivity of cell homogenates or membrane preparations with antibodies or the responses induced by receptor agonists in recipient cells. The direct function of the receptors is elucidated by reconstituting purified receptors in phospholipid vesicles with or without other components.

[1235] An additional method is based on the isolation of cDNA or genomic clones for receptors without using purified receptors. The structure of receptors and cellular responses to them is examined using these clones. Substantial amounts of receptor material is produced from these clones. Monoclonal antibodies to the SAg receptors are used to screen clones for receptors derived from cDNA libraries constructed with expression vectors.

[1236] Transfection of SAg receptor involves the ligation of the receptor gene into an appropriate expression vector, transformation of a suitable bacterial host, and isolation of an individual bacterial colony containing the plasmid vector. The plasmid DNA is harvested from the lysed bacteria. The preferred method of purification of plasmid DNA for use in transfections involves Triton-lysozyme equilibrium gradient. The cells to be used in transfection are maintained in the log phase of growth at all times. The calcium phosphate method is useful and efficient means for introduction of cloned genes in plasmid vectors into mammalian cells as described earlier in this document is preferred. However, the other methods given are useful as well. A partial list of plasmid vectors and promoters suitable for transfection of cultured mammalian cell is given in Fraser, C. M., Expression of Receptor Genes in Cultured Cells in Receptor Biochemistry, A Practical Approach, Hulme, E. C., ed., Oxford University Press, pp. 263-275, 1993.

### EXAMPLE 13

### Avoiding Interference with SAg-Specific Antibodies

[1237] Naturally antibodies are found in mammals that are specific for the SAg molecule (e.g., a Staph enterotoxin). Such antibodies bind and interfere with the SAg expressed and secreted by transfected cells. Such antibodies also hinder therapeutic action of SAg infused directly (as native protein, peptide or fusion protein).

[1238] It is desirable to neutralize or otherwise remove such before the cells of this invention are administered to a subject. One way to achieve this is to pre-treat the subject with antiidiotypic antibodies specific for the variable region of SAg-specific antibodies. Another way is to infuse SAg peptides that represent the major immunogenic portions of the overall protein. Alternatively, SAg is immobilized to a solid support by covalent bonding and the blood or plasma is perfused extracorporeally through a device containing the immobilized protein, thereby removing the antibodies by immunoadsorption. In another approach, SAg-expressing cells (prokaryotic or eukaryotic) preferably of host origin, or phage displays, are encapsulated and used as immunoadsorbents to binds circulating SAg-specific antibodies. An organoid containing these adsorbing cells is positioned subcutaneously or placed into the circulation via catheter and then removed once the adsorption process is complete. Alginate encapsulated cells expressing SAg are preferred but other known modes of cell encapsulation may be used. Liposomes with surface-bound SAg are another form of immunoabsorbent that are employed either as an organoid or by direct injection.

[1239] Induction of Immunological Tolerance

[1240] The induction of tolerance to epitopes of the SAg molecule which induce a humoral antibody response would be desirable. The portion of the SEA molecule which binds to natural antibodies is the linear sequence of residues 232-262. Immune tolerance is induced using this sequence by the method of Dintzis et al., Proc. Natl. Acad. Sci. 89: 1113-1117 (1992). in which low molecular weight peptide arrays are administered to patients with circulating antibodies to enterotoxins. The peptides are delivered parenterally or orally once weekly in doses of 1-500 mg/kg for three to six weeks after which there is a reduction and disappearance of circulating antibody specific for the tolerogen.

[1241] After one or more of the foregoing treatments, native SAg or SAg conjugated to a monoclonal tumor-specific antibody and administered to the host can now localize to tumor sites without diversion by circulating SAg-specific antibodies.

[1242] Phage Displayed SAgs

[1243] Phage display technology may also be used neutralize circulating anti-enterotoxin antibodies. The SAg and/or SAg receptor is expressed at the surface of bacteriophage as a fusion protein with the gene VIII protein (gVIIIp). This phage-displayed SAg fusion protein retains the properties of the natural protein. For this invention, the filamentous phage vector f88-4 which forms a fusion protein between the C terminus of the inserted gene product and the N terminus of gVIIIp is used. The phage expressing SEA is injected intravenously into patients that have natural antibodies to SEA. The amount of phage (transducing units) required to neutralize the circulating pool of antibodies is predetermined by antigen binding inhibition assay. The number of transducing units required to neutralize the pool of circulating SEA specific antibodies is administered intravenously. Shortly after this injection, the host is ready for treatment with active SEA which is no longer hindered from finding its “target,” i.e., enterotoxin receptors expressed by tumor cells or T cells.

[1244] SEA clone pKH-X35 is employed. PCR with Vent Polymerase 9NEB is used to mutate the 5′- and 3′-ends of the SEA gene for cloning into f88-4. The construct is as follows. The 5′ oligonucleotide used is 5′-CTCCAAGCTTTGVCCAGCGAGAAAAGCGAAG-3′. Two 3′ oligonucleotide primers are used. For the construct with the five amino acid linker between SEA and gVIIIp (SEA L), the primer 5′-GCCTCCTGCAGATCCACCGCCTCCGGATGT-ATATAAATATATATC-3′ and for the non-linker version (SEA-P); 5′-GCCTCCTGCAGATGTATATAAATATATATC-3′ are used. The two SEA PCR products are cut with HindIII and PstI and cloned into f88-4. They are transformed by electroporation into E. coli strain DH5a and sequenced. Phage are produced by growing the transformed bacteria overnight in 0.5 L of broth with 20 mg/ml tetracycline. The culture is pelleted twice (800×g for 15 min) and the phage precipitated out of the cleared supernatant by the addition of 0.15 vols. of PEG/NaCl solution (17% PEG 8000, 19% NaCl in water). After incubation at 4° C. for 2 hours, the phage are resuspended in TBS and sterile-filtered through a 0.22-m membrane. Phage are selected by the micropanning technique and by cell binding. Binding to antibody is assessed by attaching mAb to the surface of 96-well ELISA plates, blocking with 1% BSA, incubating with 100 mg/ml of SEA or PBS as a control and then incubating with the various phage preparations for >2 hours at 4° C. The phage is then eluted with 0.1 M HCl pH 2 (adjusted with glycine) for 10 minutes, neutralized and used to infect starved E. coli MC0161 F′ Kan. The infected bacteria are then spread on tetracycline (20 mg/ml) LB agar plates. After overnight culture tetracycline resistant colonies are counted representing the number of transducing units (TU) recovered. To determine the number of SEA-bearing phage among the tetracycline-resistant colonies, colony blotting is performed by standard techniques probing with a ³²P-labeled SEA probe. An antibody based variant of this technique is involves probing with a rabbit anti-SEA serum as for Western blots.

[1245] Chimeric Enterotoxins

[1246] Likewise, hybrid or chimeric SAgs that are non-immunogenic are used to stimulate cells. When these molecules are injected into hosts that have natural antibodies, they are not rapidly eliminated from the circulation. Such chimeric molecules lacking the binding site for natural antibodies preserve the T cell mitogenic and cytokine-inducing properties of the native SAg. A peptide sequence from another SAg to which antibodies do not exist is substituted using genetic or biochemical methods well known in the art. This is particularly useful in the case of enterotoxins such as SEB or SEA to which a large percentage of humans have naturally occurring circulating antibodies. The antibody binding region of these molecules near the C terminal regions is delineated. The substitution of the antibody binding sequences in SEA or SEB for sequences from SEE or SED to which a very small number of humans have circulating antibodies markedly enhances the tumor killing efficacy of the injected chimeric enterotoxins.

[1247] A hybrid molecule consisting of a 26 amino acid peptide corresponding to the N-terminal portion of SEA, the loop structure of SEA, a conserved mid-molecular sequence of SEA and SEB, and a C terminal sequence of SEB was synthesized in collaboration with Multi-Peptide Systems, La Jolla, Calif. Peptides were prepared using a variation of Merrifield's original solid phase procedure in conjunction with simultaneous multiple peptide synthesis using t-Boc chemistries. Peptides were cleaved from the resins using simultaneous liquid HF cleavage. The cleared peptides were then extracted with acetic acid and ethyl ether and lyophilized. Reverse phase HPLC analysis and mass spectral analysis revealed a single major peak with the molecular weight corresponding closely to theoretical.

[1248] Synthetic SAgs

[1249] Amino acid sequences of SEA and SEB known to be involved in the interaction with the TCR and MHC class II molecules are retained. The loop structure of SEA is retained because it is devoid of histidine moieties that are associated with the emetic response. Residues 1-10 of the N-terminal region of SEA are retained because they have MHC class II binding activity. The loop structure of SEA is retained because it and associated disulfide linkages are considered to be important for T lymphocyte mitogenicity, stabilization of the molecule, and resistance to in vivo degradation. A conservd sequence in the central portion of SEA and SEB adjacent to the disulfide loop (amino acids 107-114) was retained. Histidine moieties are deleted from the molecule because of their association with the emetic response.

[1250] Synthesis Procedure

[1251] The preparation of all pptides was carried out using a variation of Merrifield's original solid phase procedures in conjunctio with the method of Simultaneous Multiple Peptide Synthesis using t-Boc chemistries (Merrifield R B I, J. Amer. Chem. Soc. 85:2149-2154 (1963)); Houghten R A, Proc. Natl. Acad. Sci. USA 82:5131-5135 (1985); and Houghten R A et al., Intact. J. Peptide Protein Res. 27:673-678 (1985)).

[1252] 4-methylbenzhydrylamine (mBHA) and phenylacetamidomethyl (PAM) resins were purchased from Advanced Chemtech (Louisville, Ky.) and Bachem (Torrance, Calif.), respectively. All of the amino acids contained the t-butyloxycarbonyl (t-Boc)-amino protecting group and were purchased from Bachem. The side chain protecting groups included benzyl (threonine, serine and glutamic acid), chlorobenzyloxycarbonyl (lysine), bromobenzyloxycarbonyl (tyrosine), cyclohexyl (aspartic acid), p-toluene sulfonyl (arginine), formyl (tryptophan), methyl benzyl (cysteine), and dinitrophenyl or benzyloxycarbonyl (histidine). Cysteine with the HF stable acetamidomethyl (ACM) protecting group was used, upon request, for internal cysteines. Each lot of amino acid derivative was tested by melting point analysis. Reagent grade methylene chloride (CH2C12), isopropanol (IPA), and dimethylformamide (DMF) were obtained from Fisher Scientific (Tustin, Calif.). diisopropylcarbodiimide (DIPCDI) and diisopropylethylamine (DIEA) were purchased from Chem Impex (Wood Dale, Ill.). Trifluoroacetic acid was purchased from Halocarbon (Hackensack, N.J.).

[1253] The appropriate resin, mBHA for C-terminal amides and PAM for C-terminal acids, was weighed with a Mettler AE 240 balance (Highstown, N.J.) into separate polypropylene mesh (74 mm) packets which had been pre-sealed on 3 of 4 sides using a TSW TISH-300 Impulse Sealer (San Diego Bag and Supply; San Diego, Calif.). Each packet was also pre-labeled with a reference code using a KOH I NOOR Rapidograph pen with graphite based ink to allow them to be easily identified during resin addition and during the synthesis process. Each packet was then carefully sealed completely to make sure there would be no resin leakage. All the resin containing packets (up to 150) were then placed in a common Nalgene bottle. Enough CH2C12 to cover all the packets was then added to the bottle, which was then capped and vigorously shaken for 30 seconds on an Eberbach Shaker (Fisher Scientific; Tustin, Calif.) to wash and swell the resin. The CH2C12 solution was then removed. All subsequent steps involved the addition of enough solvent to cover all the packets and vigorous shaking to ensure adequate solvent transfer. The N—t-Boc was removed by acidolysis using a solution of 55% TFA in CH2C12 for 30 minutes, leaving the TFA salt of the a-amino group. The TFA wash solution was then removed. The packets were then washed for 1 min with CH2C12 (2×), IPA (2×) and CH2C12 (2×) to squeeze out excess TFA and to prepare for neutralization. The TFA salt was neutralized by washing the packets three times with 5% DIEA in CH2C12 for two minutes each. This was followed by two washes with CH2C12 to remove excess base.

[1254] The resin packets were then removed from the common Nalgene bottle and sorted according to computer generated checklists in preparation for coupling. This was double checked to ensure the packets were added to the correct amino acid solution. The packets were then added to bottles containing the appropriate 0.2 M amino acid in CH2C12 and/or DMF depending on solubility. These solutions were also prepared using computer generated information. An equal volume of 0.2 M DIPCDI was then added to activate the coupling reaction. The bottles were then shaken for one hour to ensure complete coupling. At completion, the reaction solution was discarded and the packets were washed. with DMF for 1 min to remove excess amino acid and the by-product, diisopropylurea. A final CH2C12 wash as then used to remove DMF. The packets were then removed from their individual coupling bottles and placed back into the common Nalgene bottle.

[1255] The peptides were then completed by repeating the same procedure while substituting for the appropriate amino acid at the coupling juncture. The packets were then taken through a final acidolysis along with subsequent CH2C12, IPA and CH2C12 washes to leave the peptides in the TFA salt form. The packets were then dried in preparation for the next process.

[1256] Final side chain deprotection and cleavage of the anchored peptide from the resin was achieved through simultaneous liquid HF cleavage (Houghten R A et al., supra.

[1257] Gaseous N₂, HF, and argon were acquired from Air Products (San Diego, Calif.). Anisole was purchased from Aldrich Chemical Co. (Milwaukee, Wis.). Acetic acid (HOAc) and ethyl ether were purchased from Fisher Scientific (Tustin, Calif.). Each packet along with a Teflon coated stir bar was placed into an individual reaction vessel of a multi-vessel hydrogen fluoride apparatus (Multiple Peptide Systems; San Diego, Calif.). An amount of anisole equaling 7.5% of the expected volume of HF was then added to act as a carbonium ion scavenger. The reaction tubes were lubricated with vacuum grease at the point where each contacts the apparatus and sealed onto the HF system. The system was then purged with N₂ while cooling the reaction vessels to −70° C. using an acetone/dry ice bath. HF (g) was condensed to the desired level and temperature elevated to −10° C. using ice and water. The reaction was allowed to proceed for 90 minutes with the temperature slowly rising from −10° C. to 0° C. HF was removed using a strong flow of N₂ for 90 minutes followed by the use of aspirator vacuum for 60 minutes while maintaining the temperature at 0° C. The reaction vessels were then removed from the apparatus and capped. The residual anisole was removed with two ethyl ether washes. The peptide was then extracted with two 10% HOAc washes. A 50 ml sample of the crude peptide was taken and run on an analytical Beckman 338 Gradient HPLC System (Palo Alto, Calif.) using a Vydac C18 column to profile the initial purity of the compound. The crude peptide was then lyophilized twice on a Virtis Freezemobile 24 Lyophilizer, weighed and stored under argon.

[1258] Analytical RP-HPLC was used to determine the homogeneity and approximate elution conditions of the peptides produced. HPLC grade acetonitrile (ACN) was purchased from Fisher Scientific (Tustin, Calif.). HPLC grade TFA was obtained from Pierce Chemicals (Rockford, Ill.). RP-HPLC analysis was carried out on a Beckman 338 Gradient HPLC system (Palo Alto, Calif.) equipped with a BioRad AS-100 autosampler and a Shimadzu CR4A integrator. The column used for all analyses this quarter was a Vydac C-18 column (4.6×250 mm). The solvent system used was 0.05% aqueous TFA (A) and 0.05% TFA in ACN (B) with a flow rate of 1 ml/min. Absorbance was measured at 215 nm. Most peptides were analyzed using the following special gradient; 5.60% (B) in 28 minutes. Hydrophobic peptides were analyzed using the following special gradient: 5-40% (B) in 9 minutes, 40-90% (B) for 10 additional minutes, 95% (B) for the last 9 minutes.

[1259] Analytical data was reviewed. The product peak was identified and marked based upon knowledge of common impurities and the use of predicted HPLC retention times.

[1260] Peptides that did not meet normal purity requirements for crude material were purified using preparative RP-HPLC techniques. HPLC grade acetonitrile (CAN) was purchased from Fisher Scientific (Tustin, Calif.). HPLC grade TFA was obtained from Pierce Chemicals (Rockford, Ill.). Purification was carried out on a Waters Delta Prep 3000 with a Preparative Waters Prep Pak Module Radial Compression C18 column (5 cm×25 cm, 10-20 m). The solvent system used was 0.05% aqueous TFA (A) and 0.05% TFA in ACN (B). The crude peptides were solubilized in an HOAc/H20 mixture and injected onto the column with 0.25% to 0.50% ACN per minute linear gradient. The absorbance was measured at 230 nm and 40 ml fractions were collected upon elution with an ISO Fraction Collector (Lincoln, Nebr.). The preparative profile was reviewed and selected fractions were analyzed by analytical RP-HPLC. The analytical data was reviewed and fractions were combined and lyophilized. The lyophilized material was weighed, sampled for a final analytical RP-HPLC analysis and stored under argon in powder form. This process was repeated if the purity level attained was not sufficient.

[1261] Mass spectral analysis was used to determine the molecular weight of the peptides produced. 95% ethanol was purchased from Fisher Scientific (Tustin, Calif.). HPLC grade TFA was obtained from Pierce Chemicals (Rockford, Ill.). Nitrocellulose matrices (targets) were purchased from Applied Biosystems (Foster City, Calif.).

[1262] The samples were solubilized in a 1:1 solution of 95% ethanol and 0.1% TFA (aqueous). The samples were applied to a nitrocellulose matrix (Target). The mass spectra were obtained using an ABI Bio-Ion 20 Mass Spectrometer (Foster City, Calif.). The apparatus makes use of plasma; desorption ionization via a Cf252 source. The ionized molecules are then analyzed via time-of flight. An accelerating voltage of 15,000 V is used to accelerate the particles.

[1263] The Protocol for Intramolecular Disulfide Bridge:

[1264] Dissolve crude peptide (300-500 mg) in 200 ml of deoxygenated water and adjust the pH to 8.5 using NH4OH 28%=Solution A. Note: If the peptide is not very soluble in water, some MeOH can be added.

[1265] Dissolve 0.5 g K3Fe(CN)6 in 200 ml of deoxygenated water and adjust the pH to 8.5 using NH4OH 28%=Solution B. Note: 0.5 g K3Fe(CN)6 is an average value for 500 mg of a 10 mer peptide. The excess of K3Fe(CN)6 should be approximately 3×. It can be adjusted.

[1266] Solution A is then dropped slowly into solution B over a 2 hour period. The mixture is then allowed to react, for an additional 1 hour with stirring. The pH is then adjusted to 4.0-4.5 with 10% ACTH. This solution is injected directly into a preparative RP-HPLC. The major peak is then collected. This “pseudo dilution” technique favors the intramolecular disulfide. Therefore, the major peak is the cyclic product.

[1267] The chimeric enterotoxin molecule was tested in normal rabbits and rabbits with established VX2 carcinoma. It was administered intravenously and peripherally with adjuvant. The chimeric molecule (1 mg/ml) was diluted initially in 1 ml of sterile H20. When the solution was clear, 9 ml of normal saline was added. The solution was filtered through a 0.45 m filter and stored in 0.5-1 ml aliquots. Dosage ranged from 2.6-5.0 mg/kg and was described over 3 minutes via the lateral ear vein in a volume of 0.05 ml diluted further in 1.0 ml of 0.15 M NaCl:

[1268] The i.v. line was then washed with 3 ml of 0.15M NaCl.

[1269] In two animals, the temperature rose only 0.3 F over the ensuing 24 hours and there was no discernible toxicity over the ensuing 14 days of observation. One animal was described a second dose of the chimeric molecule in pluronic acid triblock adjuvant. This was described in a dose of 8.5 mg subcutaneously in each thigh with a total dose 5 mg/kg. The pluronic acid triblock preparation was prepared as follows: 4.23 cc PBS; 0.017 cc Tween; 0.05 cc Squalene; and 0.25 cc Pluronic. The PBS and Tween were mixed first then squalene was added followed by pluronic acid. The total mixture was vortexed for 3-4 minutes. Two ml of above plus 0.34 ml of the chimeric protein (34 mg) plus 1.66 cc PBS were added to the mixture. The mixture was vortexed vigorously for 1-2 minutes. One ml was injected into each thigh (total vol. injected was 0.17 ml or 17 mg protein or 5 mg/kg).

[1270] For nearly 5 weeks after injection, no adverse effects were noted. The tumor showed slow, but progressive growth over this period of time. To date, the chimeric enterotoxin molecule appears to be safe in animals and no untoward side effects were demonstrated. The adjuvant used for these studies was the pluronic acid triblock copolymer which has been used to boost the immune response to various antigens in animal models and which is under testing at this point in humans with hepatitis and herpes simplex infections. Other adjuvants including those prepared in water and oil emulsion and aluminum hydroxide to administer various SAgs in vivo to tumor bearing rabbits were also used.

[1271] Additionally, enterotoxins such as SEE, SED, SEC, and TSST-1 are used to prepare hybrid molecules containing amino acid sequences and homologous to the enterotoxin: family of molecules. To this extent, mammary tumor virus sequences, heat shock proteins, stress peptides. Mycoplasma and mycobacterial antigens, and minor lymphocyte stimulating loci bearing tumoricidal structural homology to the enterotoxin family are useful as anti-tumor agents. Hybrid enterotoxins and other sequences homologous to the native enterotoxins are immobilized or polymerized genetically or biochemically to produce the repeating units and stoichiometry required for (a) binding of accessory cells to T lymphocytes and (b) activation of T lymphocytes.

### EXAMPLE 14

### Pharmaceutical Compositions and their Manufacture

[1272] The pharmaceutical compositions may be in the form of a lyophilized particulate material, a sterile or aseptically produced solution, a tablet, an ampoule, etc. Vehicles such as water (preferably buffered to a physiological pH such as PBS or other inert solid or liquid material may be present. In general, the compositions are prepared by being mixed with or dissolved in, bound to or otherwise combined with one of more water-insoluble or water-soluble aqueous or non aqueous vehicles, if necessary together with suitable additives and adjuvants. It is imperative that the vehicles and conditions shall not adversely affect the activity of the conjugate. Water as such is comprised within the expression vehicles.

[1273] A suitable therapeutic composition is used in the treatment of cancer of any kind including but not limited to carcinomas, sarcomas, lymphomas, leukemias and comprises a combination of:

[1274] (1) a recombinant DNA molecule encoding SAg in combination with, preferably fused with, another recombinant DNA sequence encoding another protein;

[1275] (2) a recombinant DNA molecule encoding SAg-in combination with another peptide or polypeptide; or

[1276] (3) a recombinant DNA molecule encoding a protein other than a SAg in combination with a SAg peptide or polypeptide.

[1277] These compositions that may comprise more than one components are administered together or sequentially and they may be combined (separately or together) with a delivery vehicle, preferably liposomes as disclosed herein.

[1278] Upon entering its intended or targeted cells, the therapeutic composition leads to the production of SAg and a second protein that may result in (a) apoptosis of the cancer cell and (b) with or without such apoptosis, the activation of effector cells of the immune system, including any or all of the following: cytotoxic T cells, NKT cells, NK cells, T helper cells and macrophages. The present therapeutic compositions are useful for the treatment of cancers, both primary tumors and tumor metastases.

[1279] Use of the present therapeutic composition overcomes the disadvantages of traditional treatments for metastatic cancer. For example. compositions of the present invention can target dispersed metastatic cancer cells that cannot be treated using surgery. In addition, administration of such compositions is not accompanied by the harmful side effects of conventional chemotherapy and radiotherapy.

[1280] A therapeutic composition also comprises a pharmaceutically acceptable carrier defined as any substance suitable as a vehicle for delivering a nucleic acid molecule (alone or in some combination with a protein) to a suitable in vivo or in vitro site. Preferred carriers are capable of maintaining DNA in a form that is capable of entering the target cell and being expressed by the cell.

[1281] Preferred carriers include: (1) those that transport, but do not specifically target a nucleic acid molecule to a cell (referred to herein as “non-targeting carriers”); and (2) those that deliver a nucleic acid molecule to a specific site in an animal or a specific cell (“targeting carriers”). Examples of non-targeting carriers are water, phosphate buffered saline (PBS), Ringer's solution, dextrose solution, serum-containing solutions, Hank's balanced salt solution, other aqueous, physiologically balanced solutions, oils, esters and glycols. Aqueous carriers can contain suitable additional substances which enhance chemical stability and isotonicity, such as sodium acetate, sodium chloride, sodium lactate, potassium chloride, calcium chloride, and other substances used to produce phosphate buffer, Tris buffer, and bicarbonate buffer and preservatives, such as thimerosal, m- and o-cresol, formalin and benzyl alcohol.

[1282] Preferred substances for aerosol delivery include surfactant substances such as esters or partial esters of fatty acids containing from about 6-22 carbon atoms. Examples are esters of caproic, octanoic, lauric, palmitic, stearic, linoleic, linolenic, olesteric, and oleic acids.

[1283] Other carriers can include metal particles (e.g., colloidal gold particles) for use with, for example, a biolistic gun through the skin.

[1284] Therapeutic compositions of the present invention can be sterilized by conventional methods and may be lyophilized.

[1285] The compositions of the present invention are delivered using a delivery vehicle that can be modified to target a particular site in a subject. Suitable targeting agents include ligands capable of selectively (i.e., specifically) binding to another molecule at a particular site. Examples are antibodies, antigens, receptors and receptor ligands. For example, an antibody specific for an antigen on the surface of a cancer cell can be placed on the outer surface of a liposome delivery vehicle to target the liposome to the cancer cell. By manipulating the chemical formulation of the lipid portion of a liposome preparation, it is possible to modulate its extracellular or intracellular targeting. For example, the charge of the lipid bilayer of a liposome surface can be varied chemically to promote fusion with cells having particular charge characteristics. Preferred liposomes comprise a compound that targets the liposome to a tumor cell, such as a ligand on the outer surface of the liposome that binds a molecule on the tumor cell surface.

[1286] Although the DNA constructs of the present invention can be administered in naked form, a liposome is a preferred vehicle for delivery in vivo. A liposome can remain stable in an animal for a sufficient amount of time, at least about 30 minutes, more preferably for at least about 1 hour and even more preferably for at least about 24 hours, to deliver a nucleic acid molecule to a desired site.

[1287] A liposome of the present invention comprises a lipid composition that can fuse with the plasma membrane of the targeted cell to deliver the encapsulated nucleic acid molecule into a cell. Preferably, the liposomes' transfection efficiency is about 0.5 mg DNA per 16 nmol of liposome delivered to about 10⁶ cells, more preferably about 1.0 mg DNA per 16 nmol of liposome delivered to about 10⁶ cells, and even more preferably about 2.0 mg DNA per 16 nmol of liposome delivered to about 10⁶ cells.

[1288] For use in the present invention, any liposome that is used in art-recognized gene delivery methods is appropriate. Preferred liposomes have a polycationic lipid composition and/or a cholesterol backbone conjugated to polyethylene glycol.

[1289] Complexing a liposome with nucleic acids for uses described herein is achieved using conventional methods. A suitable concentration of DNA to be added to a liposome preparation a concentration that is effective for delivering a sufficient amount of DNA molecules to a cell so that the cell can produce sufficient SAg and/or a other transduced protein to induce tumoricidal activity or to stimulate or regulate effector cells in a desired manner. Preferably, between about 0.1 mg and 10 mg of DNA is combined with about 8 nmol liposomes; more preferably, between about 0.5mg and 5 mg of DNA is used even more preferably, about 1.0 mg of DNA is combined with about 8 nmol liposomes.

[1290] Another preferred delivery system is the sickled erythrocyte containing the nucleic acids of choice a given in Example 6. The sickled erythorcytes undergo ABO and RH phenotyping to select compatible cells for delivery. The cells are delivered intravenously or intrarterially in a blood vessel perfusing a specific tumor site or organ e.g. carotid artery, portal vein, femoral artery etc. over the same amount of time required for the infusion of a conventional blood transfusion. The quantity of cells to be administered in any one treatment would range from one tenth to one half of a full unit of blood. The treatments are generally given every three days for a total of twelve treaments. However, the treatment schedule is flexible and may be given for a longer of shorter duration depending upon the patients response.

[1291] Another preferred delivery vehicle is a recombinant virus particle, for example, in the form of a vaccine. A recombinant virus vaccine of the present invention includes: the DNA encoding the therapeutic composition packaged in a viral coat that allows entrance of the transducing DNA into a cell and its expression. A number of recombinant virus particles can be used, for example, alphaviruses, poxviruses, adenoviruses, herpesviruses, arena virus and retroviruses.

[1292] Also useful as a delivery vehicle is a “recombinant cell vaccine,” preferably tumor vaccines, in which allogeneic (though histocompatible) or autologous tumor cells are transfected with a DNA preparation encoding the therapeutic proteins or peptides to be expressed. The cells are preferably irradiated and then administered to a patient by any of a number of known injection routes.

[1293] The therapeutic compositions that are administered by “tumor cell vaccine,” includes the recombinant molecules without carrier. Treatment with tumor cell vaccines is useful for primary or localized tumors as well as metastases. When used to treat metastatic cancer, which includes prevention of further metastatic disease, as well as, the cure existing metastatic disease.

[1294] As used herein, the term “treating” a disease includes alleviating the disease or any of its symptoms and/or preventing the development of a secondary disease resulting from the occurrence of the initial disease.

[1295] An “effective treatment protocol” includes a suitable and effective dose of an agent being administered to a subject, given by a suitable route and mode of administration to achieve its intended effect in treating a disease.

[1296] Effective doses and modes of administration for a given disease can be determined by conventional methods and include, for example, determining survival rates, side effects (i.e., toxicity) and qualitative or quantitative, objective or subjective, evaluation of disease progression or regression. In particular, the effectiveness of a dose regimen and mode of administration of a therapeutic composition of the present invention to treat cancer can be determined by assessing response rates. A “response rate” is defined as the percentage of treated subjects that responds with either partial or complete remission. Remission can be determined by, for example, measuring tumor size or by microscopic examination of a tissue sample for the presence of cancer cells.

[1297] In the treatment of cancer, a suitable single dose can vary depending upon the specific type of cancer and whether the cancer is a primary tumor or a metastatic form. One of skill in the art can test doses of a therapeutic composition suitable for direct injection to determine appropriate single doses for systemic administration, taking into account the usual subject parameters such as size and weight. An effective anti-tumor single dose of a therapeutic recombinant DNA molecule or combination thereof is an amount sufficient amount to result in reduction, and preferably elimination, of the tumor after the DNA molecule or combination has transfected cells at or near the tumor site.

[1298] A preferred single dose of SAg-encoding DNA molecule or fusion product thereof is an amount that, when transfected into a target cell population, leads to the production of SAg in an amount, per transfected cell, ranging from about 250 fentograms (fg) to about 1 mg, preferably from about 500 fg to about 500 pg and more preferably from about 1 pg to about 100 pg.

[1299] When the SAg-encoding DNA is combined with a second DNA molecule encoding a second protein product, an effective single dose of a the second DNA molecule is an amount that when transfected into a target cell population leads to the production of the second protein product in an amount, per transfected cell, ranging from about 10 fg to about 1 ng, more preferably from about 100 fg to about 750 pg.

[1300] An effective cancer-treating single dose of SAg-encoding DNA and a second DNA molecule encoding a second protein when administered to a subject using a non-targeting carrier, is an amount capable of reducing, and preferably eliminating, the primary or metastatic tumor following transfection by the recombinant molecules of cells at or near the tumor site. A preferred single dose of such a therapeutic composition is from about 100 mg to about 4 mg of total recombinant DNA, more preferably from about 200 mg to about 2 mg, most preferably from about 200 mg to about 800 mg of total recombinant molecules.

[1301] A preferred single dose of liposome-complexed, SAg-encoding DNA, is from about 100 mg of total DNA per 800 nmol of liposome to about 4 mg of total DNA molecules per 32 mmol of liposome, more preferably from about 200 mg per 1.6 mmol of liposome to about 3 mg of total recombinant DNA per 24 mmol of liposome, and even more preferably from about 400 mg per 3.2 mmol of liposome to about 2 mg per 16 mmol of liposome.

[1302] One of skill in the art recognizes that the number of doses required depends upon the extent of disease and the response of an individual to treatment. Thus, according to this invention, an effective number of doses includes any number required to cause regression of primary or metastatic disease.

[1303] A preferred treatment protocol comprises monthly administrations of single doses (as described above) for up to about 1 year. An effective number of doses (per individual) of a SAg-encoding DNA molecule and a second DNA molecule encoding a second protein, when administered in a non-targeting carrier or when complexed with liposomes, is from about 1 to about: 10 dosings, preferably from about 2 to about 8 dosings, and even more preferably from about 3 to about 5 dosings. Preferably, such dosings are administered about once every 2 weeks until signs of remission appear, followed by about once a month until the disease is gone.

[1304] The therapeutic compositions can be administered by any of a variety of modes and routes, including but not limited to, local administration into a site in the subject animal, which site contains abnormal cells to be destroyed. An example is the local injection within the area of a tumor or a lesion. Another example is systemic administration.

[1305] Therapeutic compositions that are best delivered by local administration include recombinant DNA molecules

[1306] (a) in a non-targeting carrier (e.g., “naked” DNA molecules as taught in Wolff K et al., 1990, Science 247, 1465-1468); and

[1307] (b) complexed to a delivery vehicle.

[1308] Suitable delivery vehicles for local administration include liposomes, and may further comprise ligands that target the vehicle to a particular site.

[1309] A preferred mode of local administration is by direct injection. Direct injection techniques are particularly useful for injecting the composition into a cellular or tissue mass such as a tumor mass or a granuloma mass that has been induced by a pathogen. Thus, the present recombinant DNA molecule complexed with a delivery vehicle is preferably injected directly into, or locally in the area of, a tumor mass or a single cancer cell.

[1310] The present composition may also be administered in or around a surgical wound. For example, a patient undergoes surgery to remove a tumor. Upon removal of the tumor, the therapeutic composition is coated on the surface of tissue inside the wound or injected into areas of tissue inside the wound. Such local administration will treat cancer cells that were not successfully removed by the surgical procedure, as well as prevent recurrence of the primary tumor or development of a secondary tumor in the surgical area.

[1311] Therapeutic compositions that are best delivered by systemic administration include recombinant DNA molecules complexed to a tumor binding ligand or a ligand that binds to the tumor vasculature or stroma. Examples are antibodies, antigens, receptor, receptor ligand or a targeted delivery vehicle as disclosed herein. These delivery vehicles may be liposomes into which are incorporated targeting ligands, preferably ligands that targeting the vehicle to the site of tumor cells or another type of lesion. For cancer treatment, ligands that selectively bind to cancer cells, or to cells within the area of a cancer cell, are preferred. Systemic administration is used to treat primary or localized tumors and, in particular, tumor metastases wherein the cancer cells are dispersed. Systemic administration is advantageous when targeting cancer in organs, especially those difficult to reach for direct injection, (e.g., heart, spleen, lung or liver).

[1312] Preferred modes and routes of systemic administration include intravenous injection and aerosol, oral and percutaneous (topical) delivery. Intravenous injection methods and aerosol delivery are performed conventionally. Oral delivery is achieved preferably by complexing the therapeutic composition to a carrier capable of withstanding degradation by digestive enzymes in the subject's digestive system. Examples of such carriers, includes plastic capsules or tablets as are known in the art. For topical delivery, the therapeutic composition is mixed with a lipophilic reagent (e.g., DMSO) that can pass into the skin.

[1313] The therapeutic compositions and methods of the present invention are intended for animals, preferably mammals and birds, in particular house pets, farm animals and zoo animals as these terms are generally understood. By “farm animals” are intended animals that are eaten or those that produce useful products (e.g., wool-producing sheep). Examples of preferred animal subjects to be treated are dogs, cats, sheep, cattle, horses and pigs. The present compositions and methods are effective in inbred and outbred animal species. Most preferably, the animal is a human.

[1314] Another component useful in combination with the therapeutic nucleic acids of this invention is an adjuvant suited for use with a nucleic acid-based vaccine. Examples of adjuvant-containing compositions include

[1315] 1) SAg-encoding DNA and a second DNA encoding a recombinant protein; or

[1316] 2) SAg-encoding DNA combined with another peptide or polypeptide; or

[1317] 3) DNA encoding a second recombinant protein and a SAg peptide or polypeptide.

[1318] As indicated above, effective doses of a SAg-encoding DNA combined with a second DNA molecule, or a vaccine nucleic acid molecule are determined conventionally by those skilled in the art. One measure of an effective dose is that produces a sufficient amount of SAg and second protein to stimulate effector cell immunity in a manner that enhances the effectiveness of the vaccine. Adjuvants of the present invention are particularly suited for use in humans because many traditional adjuvants (e.g., Freund's adjuvant and other bacterial cell wall components) are toxic whereas others are relatively ineffective (e.g., aluminum-based salts and calcium-based salts).

### EXAMPLE 15

### General Procedures for In Vivo and Ex Vivo Sensitization to Produce Tumor Specific Effector Cells for Adoptive Immunotherapy

[1319] After 9-12 days of tumor growth (approximately 8 mm in diameter), tumor-draining inguinal LN are removed sterilely. Lymphocyte suspensions are prepared by teasing LN with needles followed by pressing with the blunt end of a 10-ml plastic syringe in HBSS. Tumor draining LN cells are stimulated in vitro in a two-step procedure. Briefly, 4×10⁶ LN cells in 2 ml of complete medium (CM) containing the SAg constructs are incubated in a well of 24-well plates at 37° C. in a 5% CO₂ atmosphere for 2 days. CM consisted of RPMI 1640 medium supplemented with 10% heat-inactivated FCS, 0.1 mM nonessential amino acids, 1 mM sodium pyruvate, 2 mM freshly prepared L-glutamine. 100 mg/ml streptomycin, 100 U/ml penicillin, a 50 mg/ml gentamycin, 0.55 mg/ml fungizone (all from GIBCO, Grand Island, N.Y.) and 5×10⁻⁵M 2-mercaptoethanol (Sigma). The cells were harvested, then washed and further cultured a 3×10⁵/well in 2 ml of CM with IL-2. After 3-day incubation in IL-2, the cells are collected and counted to determine the degree of proliferation. Finally, the cells are suspended in appropriate media for flow cytometric analysis, evaluation of cytotoxicity and lymphokine secretion, or for adoptive immunotherapy.

### EXAMPLE 16

### General Adoptive Immunotherapy Protocol

[1320] Mice are injected with 2 to 3×10⁵ syngeneic tumor cells suspended in 1 ml of HBSS to initiate pulmonary metastases. On day 3, activated cells are given i.v. at numbers indicated generally 10⁶-10⁷. In some instances, mice are also treated with 15,000 U IL2 in 0.5 ml HBSS twice daily for 4 consecutive days to promote the in vivo function and survival of the activated cells. On day 20 or 21, all mice are randomized, killed and metastatic tumor nodules on the surface of the lungs enumerated as previously described. If pulmonary metastases exceeded 250, this number is arbitrarily assigned for statistical analysis. The significance of differences in metastases numbers between-experimental group is determined by the Wilcoxon rank sum test. Two sided p values of <0.1 are considered significant. Each experimental group consists of at least five mice and no animal was excluded from the statistical evaluation.

[1321] For testing SAg-glycosylceramide complexes and SAg lipopolysaccharide complexes, additional models are used to assess the dependence of the antitumor effect on NKT cells. Natural killer T cells (NKT) lymphocytes express an invariant TCR encoded by the V14 and Ja281 gene segments. Mice with a deletion of Ja281 exclusively lack V14. The V14 NKT cell-deficient mice no longer mediate IL-12 induced rejection of tumors.

[1322] Also generated are transgenic mice lacking recombination activating gene(RAG) which preferentially generate V14 NKT cells but block the development of other lymphocyte lineages, including NK, B, and T cells. These mice are termed V14 NKT mice. J281+/+(wild type), J281−/− (deleted of V14) and RAG−/−V14tgV8.2tg (deleted of NK, T and B cells but preferentially generate V14 NKT cells) mice are injected

[1323] (a) with 2×10⁶ B16 or FBL-3 (erythroleukemia) cells in the spleen to induce liver metastasis,

[1324] (b) intravenously with 3×10⁵ B16 or 2×10⁶ LLC (Lewis lung carcinoma) cells for pulmonary metastases or

[1325] (c) subcutaneously with 2×10⁶ B16 cells (melanoma) for subcutaneous tumor growth on day 0.

[1326] SAg conjugates or fusion proteins are injected in doses of 0.1 to 50 mg on days 3, 5,7, and 9 after the day of tumor implantation. Control animals are injected with PBS on the same schedule. On day 14, the mice are killed and either metastatic nodules counted or GM3 melanoma antigens measured by radioimmunoassay as previously described. For subcutaneous tumor growth, injection of IL-12 or PBS is initiated on day 5, and the mice are treated five times per week. The diameters of tumors are measured daily with calipers. The sizes of the tumor are expressed as the products of the longest diameter times the shortest diameter (in mm²).

### EXAMPLE 17

### Preparation and Administration of DNA Liposome Complexes

[1327] A representative protocol for administration of DNA-liposome complexes is as follows: DNA liposome complexes are mixed immediately prior to injection by adding 0.1 ml of lactated Ringer's solution into a sterile vial of plasmid DNA (20 mg/ml; 0.1 ml). An aliquot of this solution (0.1 ml) is added at room temperature to 0.1 ml of 150 mM (dioleoyl phosphatidylethanolamine/3β[N-(N′,N′-dimethylaminoethane)-carbamoyl] cholesterol) liposome in lactated Ringer's solution in a separate sterile vial. The DNA and liposome vials are prepared in accordance with FDA guidelines and quality control procedures. After incubation for 15 minutes at room temperature, an additional 0.5 ml of sterile lactated Ringer's solution is added to the vial and mixed. The DNA liposome solution (0.2 ml) is injected into the patient's tumor nodule under sterile conditions at the bedside after administration of local anesthesia (1% lidocaine) using a 22-gauge needle. For catheter delivery, the DNA liposome solution (0.6 ml) is delivered into the artery using percutaneous delivery. Additional protocols for administration of DNA liposomal constructs are given in Nabel, G J, Methods for Liposome-Mediated Gene Transfer to Tumor Cells in vivo, in: Methods in Molecular Medicine, Gene Therapy Protocols, Robbins P ed. Humana Press, Totowa N.J. (1996). Cationic liposomes for delivery of DNA construct to the tumor endothelium are prepared by the method of Thurston et al., J. Clin Invest., 101: 1401-1413, (1998).

### EXAMPLE 18

### General Procedures for Administering Constructs in Human Tumor Models and Human Patients

[1328] The constructs described herein are tested for therapeutic efficacy in several well established rodent models which are considered to be highly representative as described in “Protocols for Screening Chemical Agents and Natural Products Against Animal Tumors and Other Biological Systems (Third Edition)”, Cancer Chemother. Reports, Part 3, 3: 1-112, which is hereby incorporated by reference in its entirety. Additional tumor models of carcinoma and sarcoma originating from primary sites and prepared as established tumors at primary and/or metastatic sites are utilized to test further the efficacy of the constructs.

### EXAMPLE 19

### General Procedures for Administering 1) siRNA(s) to T Cells, APCs & Tumor Cells, 2) Tumor Cells or Sickled Erythrocytes Transduced with SAgs, 3) SAg-Activated T or NKT Cells in Human Tumor Models and Human Patients

[1329] A. Tumor Cells Transduced with SAg Nucleic Acids alone or Cotransfected with Oncogenes or Nucleic Acids Encoding Potent Immunogens and Bacterial Products

[1330] In a representative protocol, using the B16 melanoma or A20 lymphoma or other models given above, 10⁵-10⁷ transfected tumor cells are implanted subcutaneously and 1-6 months later 10⁵-10⁷ untransfected tumor cells, are implanted. In the case of tumor cells cotransfected with several therapeutic nucleic acids, controls are established consisting of groups transfected with only one of the nucleic acids. These single transfectants are administered on the same schedule as the cotransfectants and assessed for capacity to prevent or reverse tumor growth compared to positive controls receiving tumor alone. The animals receiving the siRNA or SAg transfected tumor cells show no-evidence or minimal of growth of the wild type tumor and prolonged survival compared to the controls in which there is 100% appearance of the tumors. The differences are statistically significant.

[1331] siRNA or SAg transfected tumor cells are also used to prevent tumor outgrowth or treat established tumors as follows. Transfected tumor cells, 10⁵-10⁷ are given at the time of tumor implantation or 3-10 days after the appearance of established tumors. Results show statistically significant arrest of tumor outgrown, tumor growth and prolongation of survival in treated animals compared to untreated controls.

[1332] B. SAg Activated Effector T or NKT Cells & siRNA transfected APCs & T Cells

[1333] Effector T or NKT cells are generated as described elsewhere and are infused intravenously in doses of 10⁶-10⁸ into syngeneic hosts that have pulmonary metastatic lesions established by injecting tumor cells intravenously 3 to 12 days earlier. Twenty days later, the animals are sacrificed and pulmonary metastases measured in treated animals compared to untreated controls. Results show statistically significant reduction in total number of pulmonary nodules and prolonged survival in the treated group compared to untreated control.

### EXAMPLE 20

### General Test Evaluation Procedures for Constructs and SAg Activated Effector T or NKT Cells

[1334] Various SAg compositions described herein are tested for therapeutic efficacy in several well established rodent models which are considered to be highly representative of a broad spectrum of human tumors. These approaches are described in detail in Geran, R. I. et al., “Protocols for Screening Chemical Agents and Natural Products Against Animal Tumors and Other Biological Systems (Third Edition)”, Canc. Chemother. Reports, Pt 3, 3:1-112, which is hereby incorporated by reference in its entirety.

[1335] A. Calculation of Mean Survival Time (MST)

$$MST ( days ) is calculated according to the formula \text{:}$$

$$\frac{S + {AS}_{( A - 1 )} - ( B + 1 ) NT}{{S}_{( A - 1 )} - NT}$$

[1336] Day: Day on which deaths are no longer considered due to drug toxicity. For example, with treatment starting on Day 1 for survival systems (such as L1210, P388, B16, 3LL, and W256): Day A=Day 6; Day B=Day beyond which control group survivors are considered “no-takes.”

[1337] S: If there are “no-takes” in the treated group, S is the sum from Day A through Day B. If there are no “no-takes” in the treated group, S is the sum of daily survivors from Day A onward.

[1338] S(A-1): Number of survivors at the end of Day (A-1).

[1339] Example: for 3LE21, S(A-1)=number of survivors on Day 5.

[1340] NT: Number of “no-takes” according to the criteria given in Protocols 7.300 and 11.103.

[1341] B. T/C Computed for all Treated Groups

T/C=MST of treated group/MST of control group×100

[1342] Treated group animals surviving beyond Day Bare eliminated from calculations (as follows):

| No. of survivors in treated | Percent of “no-takes” | |
|---|---|---|
| group beyond Day B | in control group | Conclusion |
| 1 | Any percent | “no-take” |
| 2 | <10 | drug inhibition |
| | ³10 | “no-takes” |
| ³3 | <15 | drug inhibitions |
| | ³15 | “no-takes” |

[1343] Positive control compounds are not considered to have “no-takes” regardless of the number of “no-takes” in the control group. Thus, all survivors on Day B are used in the calculation of T/C for the positive control. Surviving animals are evaluated and recorded on the day of evaluation as “cures” or “no-takes.”

[1344] Calculation of Median Survival Time (MedST)

[1345] MedST is the median day of death for a test or control group. If deaths are arranged in chronological order of occurrence (assigning to survivors, on the final day of observation, a “day of death” equal to that day), the median day of death is a day selected so that one half of the animals died earlier and the other half died later or survived. If the total number of animals is odd, the median day of death is the day that the middle animal in the chronological arrangement died. If the total number of animals is even, the median is the arithmetical mean of the two middle values. Median survival time is computed on the basis of the entire population and there are no deletion of early deaths or survivors, with the following exception:

[1346] C. Computation of MedST from Survivors

[1347] If the total number of animals including survivors (N) is even, the MedST (days) (X+Y)/2, where X is the earlier day when the number of survivors is N/2, and Y is the earliest day when the number of survivors (N/2)−1. If N is odd, the MedST (days) is X.

[1348] D. Computation of MedST from Mortality Distribution

[1349] If the total number of animals including survivors (N) is even, the MedST (days) (X+Y)/2, where X is the earliest day when the cumulative number of deaths is N/2, and Y is the earliest day when the cumulative number of deaths is (N/2)+1. If N is odd, the MedST (days) is X. “Cures” and “no-takes” in systems evaluated by MedST are based upon the day of evaluation. On the day of evaluation any survivor not considered a “no-take” is recorded as a “cure.” Survivors on day of evaluation are recorded as “cures” or “no-takes,” but not eliminated from the calculation.

[1350] E. Calculation of Approximate Tumor Weight from Measurement of Tumor Diameters with Vernier Calipers

[1351] The use of diameter measurements (with Vernier calipers) for estimating treatment effectiveness on local tumor size permits retention of the animals for lifespan observations. When the tumor is implanted sc, tumor weight is estimated from tumor diameter measurements as follows. The resultant local tumor is considered a prolate ellipsoid with one long axis and two short axes. The two short axes are assumed to be equal. The longest diameter (length) and the shortest diameter (width) are measured with Vernier calipers. Assuming specific gravity is approximately 1.0, and Pi is about 3, the mass (in mg) is calculated by multiplying the length of the tumor by the width squared and dividing the product by two. Thus,

$$Tumor weight ( mg ) = \frac{length ( mm ) \times {( width [ mm ] )}^{2}}{2} or \frac{L \times {( W )}^{2}}{2}$$

[1352] The reporting of tumor weights calculated in this way is acceptable inasmuch as the assumptions result in as much accuracy as the experimental method warrants.

[1353] F. Calculation of Tumor Diameters

[1354] The effects of a drug on the local tumor diameter may be reported directly as tumor diameters without conversion to tumor weight. To assess tumor inhibition by comparing the tumor diameters of treated animals with the tumor diameters of control animals, the three diameters of a tumor are averaged (the long axis and the two short axes). A tumor diameter T/C of 75% or less indicates activity and a T/C of 75% is approximately equivalent to a tumor weight T/C of 42%.

[1355] G. Calculation of Mean Tumor Weight from Individual Excised Tumors

[1356] The mean tumor weight is defined as the sum of the weights of individual excised tumors divided by the number of tumors. This calculation is modified according to the rules listed below regarding “no-takes.” Small tumors weighing 39 mg or less in control mice or 99 mg or less in control rats, are regarded as “no-takes” and eliminated from the computations. In treated groups, such tumors are defined as “no-takes” or as true drug inhibitions according to the following rules:

| Percent of | Percent of | |
|---|---|---|
| small tumors in | “no-takes” in | |
| treated group | control group | Action |
| ≦17 | Any percent | no-take; not used |
| | | in calculations |
| 18-39 | <10 | drug inhibition; |
| | | use in calculations |
| | ≧10 | no-takes; not used |
| | | in calculations |
| ≧40 | <15 | drug inhibition; |
| | | use in calculations |
| | ≧15 | Code all nontoxic |
| | | tests “33” |

[1357] Positive control compounds are not considered to have “no-takes” regardless of the number of “no-takes” in the control group. Thus, the tumor weights of all surviving animals are used in the calculation of T/C for the positive control (T/C defined above) SDs of the mean control tumor weight are computed the factors in a table designed to estimate SD using the estimating factor for SD given the range (difference between highest and lowest observation). Biometrik Tables for Statisticians (Pearson E S, and Hartley H G, eds.) Cambridge Press, vol. 1, table 22, p. 165.

[1358] II. Specific Tumor Models

[1359] A. Lymphoid Leukemia L1210

[1360] Summary: Ascitic fluid from donor mouse is transferred into recipient BDF1 or CDF1 mice. Treatment begins 24 hours after implant. Results are expressed as a percentage of control survival time. Under normal conditions, the inoculum site for primary screening is i.p., the composition being tested is administered i.p., and the parameter is mean survival time. Origin of tumor line: induced in 1948 in spleen and lymph nodes of mice by painting skin with MCA. J Natl Cancer Inst. 13:1328, 1953.

| | |
|---|---|
| Animals | One sex used for all test and control animals in one experiment. |
| Tumor Transfer | Inject ip, 0.1 ml of diluted ascitic fluid containing 10⁵ cells |
| Propagation | DBA/2 mice (or BDF1 or CDF1 for one generation). |
| Time of Transfer | Day 6 or 7 |
| Testing | BDF₁ (C57BL/6 × DBA/2) or CDF₁ (BALB/c × DBA/2) |
| Time of Transfer | Day 6 or 7 |
| Weight | Within a 3-g range, minimum weight of 18 g for males and 17 g for females. |
| Exp Size (n) | 6/group; No. of control groups varies according to number of test groups. |

Testing Schedule

| DAY | PROCEDURE |
|---|---|
| 0 | Implant tumor. Prepare materials. Run positive control in every odd-numbered experiment. |
| | Record survivors daily. |
| 1 | Weigh and randomize animals. Begin treatment with therapeutic composition. Typically, |
| | mice receive 1 μg of the test composition in 0.5 ml saline. Controls receive saline alone. |
| | Treatment is one dose/week. Any surviving mice are sacrificed after 4 wks of therapy. |
| 5 | Weigh animals and record. |
| 20 | If there are no survivors except those treated with positive control compound, evaluate |
| 30 | Kill all survivors and evaluate experiment. |

[1361] Quality Control: Acceptable control survival time is 8-10 days. Positive control compound is 5-fluorouracil; single dose is 200 mg/kg/injection, intermittent dose is 60 mg/kg/injection, and chronic dose is 20 mg/kg/injection. Ratio of tumor to control (T/C) lower limit for positive control compound is 135%.

[1362] Evaluation: Compute mean animal weight on Days 1 and 5, and at the completion of testing compute T/C for all test groups with >65% survivors on Day 5. A T/C value 85% indicates a toxic test. An initial T/C 125% is considered necessary to demonstrate activity. A reproduced T/C 125% is considered worthy of further study. For confirmed activity a composition should have two multi-dose assays that produce a T/C 125%.

[1363] B. Lymphocytic Leukemia P388

[1364] Summary: Ascitic fluid from donor mouse is implanted in recipient BDF1 or CDF1 mice. Treatment begins 24 hours after implant. Results are expressed as a percentage of control survival time. Under normal conditions, the inoculum site for primary screening is ip, the composition being tested is administered ip daily for 9 days, and the parameter is MedST. Origin of tumor line: induced in 1955 in a DBA/2 mouse by painting with MCA. Scientific Proceedings, Pathologists and Bacteriologists 33:603, 1957.

| | |
|---|---|
| Animals | One sex used for all test and control animals in one experiment. |
| Tumor Transfer | Inject ip, 0.1 ml of diluted ascitic fluid containing 10⁶ cells |
| Propagation | DBA/2 mice (or BDF1 or CDF1 for one generation). |
| Time of Transfer | Day 7 |
| Testing | BDF₁ (C57BL/6 × DBA/2) or CDF₁ (BALB/c × DBA/2) |
| Time of Transfer | Day 6 or 7 |
| Weight | Within a 3-g range, minimum weight of 18 g for males and 17 g for females. |
| Exp Size (n) | 6/group; No. of control groups varies according to number of test groups. |

Testing Schedule

| DAY | PROCEDURE |
|---|---|
| 0 | Implant tumor. Prepare materials. Run positive control in every odd-numbered experiment. |
| | Record survivors daily. |
| 1 | Weigh and randomize animals. Begin treatment with therapeutic composition. Typically, |
| | mice receive 1 ng of the test composition in 0.5 ml saline. Controls receive saline alone. |
| | Treatment is one dose/week. Any surviving mice are sacrificed after 4 wks of therapy. |
| 5 | Weigh animals and record. |
| 20 | If there are no survivors except those treated with positive control compound, evaluate |
| 30 | Kill all survivors and evaluate experiment. |

[1365] Acceptable MedST is 9-14 days. Positive control compound is 5-fluorouracil: single dose is 200 mg/kg/injection, intermittent dose is 60 mg/kg/injection, and chronic dose is 20.mg/kg/injection. T/C lower limit for positive control compound is 135% Check control deaths, no takes, etc.

[1366] Quality Control: Acceptable MedST is 9-14 days. Positive control compound is 5-fluorouracil: single dose is 200 mg/kg/injection, intermittent dose is 60 mg/kg/injection, and chronic dose is 20 mg/kg/injection. T/C lower limit for positive control compound is 135%. Check control deaths, no takes, etc.

[1367] Evaluation: Compute mean animal weight on Days 1 and 5, and at the completion of testing compute T/C for all test groups with >65% survivors on Day 5. A T/C value of 85% indicates a toxic test. An initial T/C of 125% is considered necessary to demonstrate activity. A reproduced T/C 125% is considered worthy of further study. For confirmed activity a composition should have two multi-dose assays that produce a T/C 125%.

[1368] C. Melanotic Melanoma B16

[1369] Summary: Tumor homogenate is implanted ip or sc in BDF1 mice. Treatment begins 24 hours after either ip or sc implant or is delayed until an sc tumor of specified size (usually approximately 400 mg) can be palpated. Results expressed as a percentage of control survival time. The composition being tested is administered ip, and the parameter is mean survival time. Origin of tumor line: arose spontaneously in 1954 on the skin at the base of the ear in a C57BL/6 mouse. Handbook on Genetically Standardized Jax Mice. Jackson Memorial Laboratory, Bar Harbor, Me., 1962. See also Ann NY Acad Sci 100, Parts 1 and 2, 1963.

| | |
|---|---|
| Animals | One sex used for all test and control animals in one experiment. |
| Propagation Strain | C57BL/6 mice |
| Tumor Transfer | Implant fragment sc by trochar or 12-g needle or tumor homogenate* every |
| | 10-14 days into axillary region with puncture in inguinal region. |
| Testing Strain | BDF₁ (C57BL/6 × DBA/2) |
| Time of Transfer | Excise sc tumor on Day 10-14 from donor mice and implant as above |
| Weight | Within a 3-g range, minimum weight of 18 g for males and 17 g for females. |
| Exp Size (n) | 10/group; No. of control groups varies according to number of test groups. |

*Tumor homogenate: Mix 1 g or tumor with 10 ml of cold balanced salt solution, homogenize, and implant
0.5 ml of tumor homogenate ip or sc. Fragment: A 25-mg fragment may be implanted sc.

| Testing Schedule | |
|---|---|
| DAY | PROCEDURE |
| 0 | Implant tumor. Prepare materials. Run positive control in every odd-numbered experiment. |
| | Record survivors daily. |
| 1 | Weigh and randomize animals. Begin treatment with therapeutic composition. Typically, |
| | mice receive 1 μg of the test composition in 0.5 ml saline. Controls receive saline alone. |
| | Treatment is one dose/week. Any surviving mice are sacrificed after 8 wks of therapy. |
| 5 | Weigh animals and record. |
| 60 | Kill all survivors and evaluate experiment. |

[1370] Quality Control: Acceptable control survival time is 14-22 days. Positive control compound is 5-fluorouracil: single dose is 200 mg/kg/injection, intermittent dose is 60 mg/kg/injection, and chronic dose is 20 mg/kg/injection. T/C lower limit for positive control compound is 135% Check control deaths, no takes, etc.

[1371] Evaluation: Compute mean animal weight on Days 1 and 5, and at the completion of testing compute T/C for all test groups with >65% survivors on Day 5. A T/C value of 85% indicates a toxic test. An initial T/C of 125% is considered necessary to demonstrate activity. A reproduced T/C 125% is considered worthy of further study. For confirmed activity a composition should have two multi-dose assays that produce a T/C 125%.

[1372] Metastasis after IV Injection of Tumor Cells

[1373] 10⁵ B16 melanoma cells in 0.3 ml saline are injected intravenously in C57BL/6 mice. The mice are treated intravenously with Ig of the composition being tested in 0.5 ml saline. Controls receive saline alone. The treatment is given as one dose per week. Mice sacrificed after 4 weeks of therapy, the lungs are removed and metastases are enumerated.

[1374] C. 3LL Lewis Lung Carcinoma

[1375] Summary: Tumor may be implanted sc as a 2-4 mm fragment, or im as a 2×10⁶-cell inoculum. Treatment begins 24 hours after implant or is delayed until a tumor of specified size (usually approximately 400 mg) can be palpated. The composition being tested is administered ip daily for 11 days and the results are expressed as a percentage of the control. Origin of tumor line: arose spontaneously in 1951 as carcinoma of the lung in a C57BL/6 mouse. Cancer Res 15:39, 1955. See, also Malave, I. et al., J. Nat'l. Canc. Inst. 62:83-88 (1979).

| | |
|---|---|
| Animals | One sex used for all test and control animals in one experiment. |
| Propagation Strain | C57BL/6 mice |
| Tumor Transfer | Inject cells im in hind leg or implant fragment sc in axillary region with |
| | puncture in inguinal region. Transfer on day 12-14 |
| Testing Strain | BDF₁ (C57BL/6 × DBA/2) or C3H mice |
| Time of Transfer | Same as above |
| Weight | Within a 3-g range, minimum weight of 18 g for males and 17 g for females. |
| Exp Size (n) | 6/group for sc implant, or 10/group for im implant.; No. of control groups |
| | varies according to number of test groups. |

Testing Schedule

| DAY | PROCEDURE |
|---|---|
| 0 | Implant tumor. Prepare materials. Run positive control in every odd-numbered experiment. |
| | Record survivors daily. |
| 1 | Weigh and randomize animals. Begin treatment with therapeutic composition. Typically, |
| | mice receive 1 μg of the test composition in 0.5 ml saline/Controls receive saline alone. |
| | Treatment is one dose/week. Any surviving mice are sacrificed after 4 wks of therapy. |
| 5 | Weigh animals and record. |
| Final day | Kill all survivors and evaluate experiment. |

[1376] Quality Control: Acceptable im tumor weight on Day 12 is 500-2500 mg. Acceptable im tumor MedST is 18-28 days. Positive control compound is cyclophosphamide: 20 mg/kg/injection, qd, Days 1-11. Check control deaths, no takes, etc.

[1377] Evaluation: Compute mean animal weight when appropriate, and at the completion of testing compute T/C for all test groups. When the parameter is tumor weight, a reproducible T/C of 42% is considered necessary to demonstrate activity. When the parameter is survival time, a reproducible T/C of 125% is considered necessary to demonstrate activity. For confirmed activity a composition must have two multi-dose assays

[1378] D. 3LL Lewis Lung Carcinoma Metastasis Model

[1379] This model has been utilized by a number of investigators. See, for example, Gorelik, E. et al., J. Nat'l. Canc. Inst. 65:1257-1264 (1980); Gorelik, E. et al., Rec. Results Canc. Res. 75:20-28 (1980); Isakov, N. et al., Invasion Metas. 2:12-32 (1982) Talmadge J. E. et al., J. Nat'l. Canc. Inst. 69:975-980 (1982); Hilgard, P. et al., Br. J. Cancer 35:78-86(1977)).

[1380] Mice: male C57BL/6 mice, 2-3 months old. Tumor: The 3LL Lewis Lung Carcinoma was maintained by sc transfers in C57BL/6 mice. Following sc, im or intra-footpad transplantation, this tumor produces metastases, preferentially in the lungs. Single-cell suspensions are prepared from solid tumors by treating minced tumor tissue with a solution of 0.3% trypsin. Cells are washed 3 times with PBS (pH 7.4) and suspended in PBS. Viability of the 3LL cells prepared in this way is generally about 95-99% (by trypan blue dye exclusion). Viable tumor cells (3×10⁴-5×10⁶) suspended in 0.05 ml PBS are injected into the right hind foot pads of C57BL/6 mice. The day of tumor appearance and the diameters of established tumors are measured by caliper every two days. Typically, mice receive 1 μg of the composition being tested in 0.5 ml saline. Controls receive saline alone. The treatment is given as one or two doses per week.

[1381] In experiments involving tumor excision, mice with tumors 8-10 mm in diameter are divided into two groups. In one group, legs with tumors are amputated after ligation above the knee joints. Mice in the second group are left intact as nonamputated tumor-bearing controls. Amputation of a tumor-free leg in a tumor-bearing mouse has no known effect on subsequent metastasis, ruling out possible effects of anesthesia, stress or surgery. Surgery is performed under Nembutal anesthesia (60 mg veterinary Nembutal per kg body weight).

[1382] Determination of Metastasis Spread and Growth

[1383] Mice are killed 10-14 days after amputation. Lungs are removed and weighed. Lungs are fixed in Bouin's solution and the number of visible metastases is recorded. The diameters of the metastases are also measured using a binocular stereoscope equipped with a micrometer-containing ocular under 8× magnification. On the basis of the recorded diameters, it is possible to calculate the volume of each metastasis. To determine the total volume of metastases per lung, the mean number of visible metastases is multiplied by the mean volume of metastases. To further determine metastatic growth, it is possible to measure incorporation of ¹²⁵IdUrd into lung cells (Thakur, M. L. et al., J. Lab. Clin. Med. 89:217-228 (1977). Ten days following tumor amputation, 25 mg of FdUrd is inoculated into the peritoneums of tumor-bearing (and, if used, tumor-resected mice. After 30 min, mice are given 1 mCi of ¹²⁵IdUrd. One day later, lungs and spleens are removed and weighed, and a degree of ¹²⁵IdUrd incorporation is measured using a gamma counter.

[1384] Statistics: Values representing the incidence of metastases and their growth in the lungs of tumor-bearing mice are not normally distributed. Therefore, non-parametric statistics such as the Mann-Whitney U-Test may be used for analysis.

[1385] Study of this model by Gorelik et al. (1980, supra) showed that the size of the tumor cell inoculum determined the extent of metastatic growth. The rate of metastasis in the lungs of operated mice was different from primary tumor-bearing mice. Thus in the lungs of mice in which the primary tumor had been induced by inoculation of large doses of 3LL cells (1-5×10⁶) followed by surgical removal, the number of metastases was lower than that in nonoperated tumor-bearing mice, though the volume of metastases was higher than in the nonoperated controls. Using ¹²⁵IdUrd incorporation as a measure of lung metastasis, no significant differences were found between the lungs of tumor-excised mice and tumor-bearing mice originally inoculated with 10^{6 3}LL cells. Amputation of tumors produced following inoculation of 10⁵ tumor cells dramatically accelerated metastatic growth. These results were in accord with the survival of mice after excision of local tumors. The phenomenon of acceleration of metastatic growth following excision of local tumors had been observed by other investigators. The growth rate and incidence of pulmonary metastasis were highest in mice inoculated with the lowest doses (3×10⁴-10⁵ of tumor cells) and characterized also by the longest latency periods before local tumor appearance. Immunosuppression accelerated metastatic growth, though nonimmunologic mechanisms participate in the control exerted by the local tumor on lung metastasis development. These observations have implications for the prognosis of patients who undergo cancer surgery.

[1386] E. Walker Carcinosarcoma 256

[1387] Summary: Tumor may be implanted sc in the axillary region as a 2-6 mm fragment, im in the thigh as a 0.2-ml inoculum of tumor homogenate containing 10⁶ viable cells, or ip as a 0.1-ml suspension containing 10⁶ viable cells. Treatment of the composition being tested is usually ip. Origin of tumor line: arose spontaneously in 1928 in the region of the mammary gland of a pregnant albino rat. J Natl Cancer Inst 13:1356, 1953.

| | |
|---|---|
| Animals | One sex used for all test and control animals in one experiment. |
| Propagation Strain | Random-bred albino Sprague-Dawley rats |
| Tumor Transfer | S.C. fragment implant is by trochar or 12-g needle into axillary |
| | region with puncture in inguinal area. I.m. implant is with 0.2 ml |
| | of tumor homogenate (containing 10⁶ viable cells) into the thigh. |
| | I.p. implant is with 0.1 ml suspension (containing 10⁶ viable |
| | cells) |
| | Day 7 for im or ip implant; Days 11-13 for sc implant |
| Testing Strain | Fischer 344 rats or random-bred albino rats |
| Time of Transfer | Same as above |
| Weight | 50-70 g (maximum of 10-g weight range within each experiment) |
| Exp Size (n) | 6/group; No. of control groups varies according to number of test |
| | groups. |

| | Prepare drug | Administer | Weigh animals | Evaluate on |
|---|---|---|---|---|
| Test system | on day: | drug on days: | on days | days |
| 5WA16 | 2 | 3-6 | 3 and 7 | 7 |
| 5WA12 | 0 | 1-5 | 1 and 5 | 10-14 |
| 5WA31 | 0 | 1-9 | 1 and 5 | 30 |

[1388] In addition the following general schedule is followed

| DAY | PROCEDURE |
|---|---|
| 0 | Implant tumor. Prepare materials. Run positive |
| | control in every odd-numbered experiment. |
| | Record survivors daily. |
| 1 | Weigh and randomize animals. Begin treatment |
| | with therapeutic composition. Typically, |
| | mice receive 1 μg of the test composition in |
| | 0.5 ml saline. Controls receive saline alone. |
| | Treatment is one dose/week. Any surviving mice |
| | are sacrificed after 4 wks of therapy. |
| Final day | Kill all survivors and evaluate experiment. |

[1389] Quality Control: Acceptable i.m. tumor weight or survival time for the above three test systems are: 5WA16: 3-12 g.; 5WA12: 3-12 g.; 5WA31 or 5WA21: 5-9 days.

[1390] Evaluation: Compute mean animal weight when appropriate, and at the completion of testing compute T/C for all test groups. When the parameter is tumor weight, a reproducible. T/C 42% is considered necessary to demonstrate activity. When the parameter is survival time, a reproducible T/C 125% is considered necessary to demonstrate activity. For confirmed activity.

[1391] F. A20 lymphoma

[1392] 10⁶ murine A20 lymphoma cells in 0.3 ml saline are injected subcutaneously in Balb/c mice. The mice are treated intravenously with Ig of the composition being tested in 0.5 ml saline. Controls receive saline alone. The treatment is given as one dose per week. Tumor growth is monitored daily by physical measurement of tumor size and calculation of total tumor volume. After 4 weeks of therapy the mice are sacrificed.

[1393] Treatment Regimens and Results (Constructs)

[1394] For determining efficacy in the tumor models described above the general categories of therapeutic constructs used are given below. For all of the classes of conjugates listed below, the SAg component can be prepared as either a DNA encoding SAg or as the SAg polypeptide itself In either form the SAg DNA or protein may be conjugated to additional molecules, either nucleic acid or polypeptides. Operationally, for therapeutic use in vivo or ex vivo, these conjugates may be prepared by chemical coupling or by recombinant means (whichever is appropriate) and conjugated to a tumor-targeting structure or incorporated into a vehicle (e.g., liposomes) that themselves comprise a tumor targeting structure(s). Again, examples of such targeting structures include, but are not limited to, an antibody, antigen, receptor or receptor ligand. Methods are disclosed in Examples 1, 3, 4, 5, 6, 7, 14, 17, 18, 30-32.

[1395] 1. SAg Nucleic Acid Constructs including Phage Displays and SAg Transfected Bacterial Cells

[1396] 2. Glycosylated SAgs

[1397] 3. Chimeric SAgs

[1398] Conjugates having a Superantigen component (polypeptide or nucleic acid) and a partner that is either a single component or a conjugate of 2 or more components (protein, carbohydrate, lipid or DNA) as indicated below:

| Superantigen | |
|---|---|
| (Protein or DNA) | Partner (Single Component or Coniuqate) |
| 4. | DNA coding sequence |
| 5. | Polypeptide |
| 6. | Nucleic acid |
| 7. | Tumor associated Peptide |
| 8. | Tumor Antigen-MHC protein |
| 9. | LPS |
| 10. | Lipoarabinomannan |
| 11. | Ganglioside |
| 12. | Glycosphingolipid |
| 13. | Ganglioside-CD1 receptor |
| 14. | Glycosphingolipid-CD1 receptor |
| 15. | Glycosylceramide (e.g., Gal-Cer) |
| 16. | GalCer-CD1 receptor |
| 17. | Gal |
| 18. | Arg-Gly-Asp or Asn-Gly-Arg |
| 19 | iNOS |
| 20. | Gb2 or Gb3 or Gb4 |
| 21. | (Gb2 or Gb3 or Gb4)-CD1 receptor |
| 22. | -GPI-(Gb2 or Gb3 or Gb4) |
| 23. | -GPI-(Gb2 or Gb3 or Gb4)-CD1 receptor |
| 24. | Verotoxin |
| 25. | Verotoxin A or B Subunit |
| 26. | IFN□ receptor peptide homologous to VT |
| 27. | CD19 peptide homologous to VT |
| 28. | LDL, VLDL, HDL, IDL |
| 29. | Apolipoproteins (e.g., Lp(a), apoB-100, apoB-48, apoE) |
| 30. | OxyLDL, oxyLDL mimics, (e.g., 7β-hydroperoxycholesterol, 7□-hydroxycholesterol, 7- |
| | ketocholesterol, 5□-6□-epoxycholesterol, 7□-hydroperoxy-choles-5-en-3β-ol, 4- |
| | hydroxynonenal (4-HNE), 9-HODE, 13-HODE and cholesterol-9-HODE) |
| 31. | OxyLDL by products (e.g. lysolecithin, lysophosphatidylcholine, malondialdehyde, 4- |
| | hydroxynonenal) |
| 32. | LDL & oxyLDL receptors (e.g., LDL oxyLDL, acetyl-LDL, VLDL, LRP, CD36, SREC, |
| | LOX-1, macrophage scavenger receptors) |
| 33. | phytosphingosine, -GPI-phytosphingosine |
| 34. | tumor associated lipid antigens |
| 35. | glycolipid, proteolipid, glycosphingolipid, sphingolipid with inositolphosphate -containing |
| | head groups, phytoglycolipids, mycoglycolipids, -GPI-sphingosines, -GPI-lipids |
| 36. | sphingolipids with inositolphosphate-containing head groups having the general |
| | structure: ceramide-P-myoinositol-X with X referring to polar substituents comprising |
| | ceramide-p-inositol-mannose, inositol-1-P-(6)mannose(a1,2 inositol-1P-(1)ceramide, |
| | (inositol-P)2-ceramide, inositol-P-inositol-P-ceramide, inositol-P-inositol-P-ceramide. |
| 37. | tumor associated glycan antigens consisting of peptidoglycans or glycan |
| | phosphotidyinositol (GPI) structures |

[1399] Vaccine Use

[1400] For use as a vaccine, the constructs are administered subcutaneously, intramuscularly intradermally or intraperitoneally in doses ranging from 50 to 500 ng in various vehicles such as Freund's adjuvant, aluminum hydroxide, pluruonic acid triblock and liposomes as described in the art. Doses may be repeated every 10 days. Tumors are implanted after the last dose. A control group does not receive the vaccine.

[1401] Use in Established Tumors

[1402] For proteins or nucleic acid constructs, treatment consists of injecting animals iv or ip with 50, 500 1000 or 5,000 ng of in 0.1-0.5 ml of normal saline. Unless indicated otherwise above, treatments are given one to three times per week for two to five weeks. Phage displays, yeast displays and vesilcle, SAg-bacterial or viral constructs or SAg vesicles are administered as 10⁹ transducing units (TU) and irradiated bacterial cells, yeast cells as 10⁵-10⁶ cells iv into the tail vein one to three times per week for two to five weeks or directly into tumor in 30-75% or the iv doses on the same schedule. Exosomes or vesicles, harvested from transfected, transformed or fusion tumor cells or sickled cells or mutant yeast are given i.v. into the tail vein in a dose of 0.25-1 g per animal one to three times per week for two to five weeks. The results shown in Table VI are for each composition and dose tested. The results are statistically significant by the Wilcoxon rank sum test.

[1403] Treatment regimens for SAg activated effector T or NKT cells are in Example 16, 18, 19. The preferred animal model for evaluation of the adoptively transferred T or NKT effector cells is the MCA 205/207 fibrosarcoma with pulmonary metastases (Shu S. et al., J. Immunol. 152: 1277-1288 (1994)). The other models given in Example 20 are also suitable for evaluation of the therapeutic effectiveness of the effector T cells.

TABLE VI

| Tumor Model | Parameter | % of Control Response |
|---|---|---|
| L1210 | MST | >130% |
| P388 | MST | >130% |
| B16 | MST | >130% |
| B16 metastasis | Median number of metastases | <70% |
| 3LL | MST | >130% |
| | Mean tumor weight | <40% |
| 3LL metastasis | MST | >130% |
| | Mean lung weight | <60 |
| | Median number of metastases | <60% |
| | Median volume of metastases | <60% |
| | Medial volume of metastases | <60% |
| | Median uptake of IdUrd | <60% |
| Walker carcinoma | MedST | >130% |
| | Mean tumor weight | <40% |
| A20 | MST | >130% |
| | Mean tumor volume | <40% |

### EXAMPLE 22

### Antitumor Effects of Therapeutic Constructs and Effector T, NKT Cells or Sickled Erythrocytes in Human Patients

[1404] All patients treated have histologically confirmed malignant disease including carcinomas, sarcomas, melanomas, lymphomas and leukemia and have failed conventional therapy. Patients may be diagnosed as having any stage of metastatic disease involving any organ system. Staging describes both tumor and host, including organ of origin of the tumor, histologic type and histologic grade, extent of tumor size, site of metastases and functional status of the patient. A general classification includes the known ranges of Stage I (localized disease) to Stage 4(widespread metastases). Patient history is obtained and physical examination performed along with conventional tests of cardiovascular and pulmonary function and appropriate radiologic procedures. Histopathology is obtained to verify malignant disease.

### EXAMPLE 23

### Treatment Procedures

[1405] Constructs (or Preparations)

[1406] Doses of the constructs are determined as described above using, inter alia, appropriate animal models of tumors. Two classes of therapeutic compositions are administered namely SAg proteins or SAg conjugates (nucleic acids or peptides-polypeptides), SAg phage displays, SAg yeast displays, SAg bacterial cell displays, as described above for animal models.

[1407] A treatment consists of injecting the patient with 0.5-500 mg of Construct intravenously in 200 ml of normal saline over a one hour period. Treatments are given 3×/week for a total of 12 treatments. Patients with stable or regressing disease are treated beyond the 12^{th} treatment. Treatment is given on either an outpatient or inpatient basis as needed.

[1408] Effector T or NKT Cells

[1409] Eligible patients are treated with tumor antigens such as irradiated tumor cells or GM-CSF transduced tumor cells injected approximately 10 centimeters from a draining lymph node site. Ten days post injection, draining lymph nodes are obtained in a limited surgical procedure at the site draining the injection. The lymph nodes are converted to a single cell suspension of lymphocytes and these are incubated with various SAg preparations for two days followed by Il-2 for an additional 72 hours. These lymphocytes now called effector T cells or NKT cell are used for adoptive immunotherapy.

[1410] Effector T or NKT cells harvested by centrifugation at 500×g for 15 min and the cell pellets are pooled. After washing the cells in HBSS, the cell are resuspended in 200 ml of normal saline containing 5% human serum albumin and 450,000 IU of IL-2 for transfer. Each recipient will receive four escalating doses or 33 million, 100 million, 330 million and 1 billion cells per square meter of body surface area each given one week apart. Cells are infused through a subclavian central venous catheter over a 30- minute interval. IL-2 administration i.v. is commenced immediately after completion of cell infusion at a dose and schedule of 180,000 IU/ml every 8 h. for 5 days. All patients receive indomethacin (50 mg P.O.) every 8 h, acetaminophen (650 mg P.O.) every 6 h. and ranitidine (150 mg P.O.) every 12 h while receiving IL-2 in order to reduce febrile and gastric side effects. As controls, a cohort of patients is treated with the in vivo tumor vaccination step and IL-2 without the tumor effector cells. Patients will be followed for clinical response every 4 weeks for 2 months with repeat radiological examinations.

[1411] Abbreviated Exemplary Human Protocol: Sequential Administration of GM-CSF Transduced Tumor Cells In Vivo and SAg Activated NKT and T Cells Ex Vivo in Patients with Metastatic Renal Cell Carcinoma and Melanoma

[1412] In vivo Phase: Immunization with GM-CSF Transduced Tumor Cells

[1413] Day 1: GM CSF transfected tumor cells (renal carcinoma/melanoma) are injected as given in Phase I GM-CSF Gene Transduction Protocol [Human Gene Therapy 6: 347-368, (1995)]

[1414] Day 7-10: Lymph Nodes draining the GM-CSF transfected tumor cell sites are removed and placed in tissue culture OR patients are pheresed and their peripheral blood T cells and NKT cells collected for further treatment in tissue culture as described below.

[1415] Ex Vivo Phase: Immunization with SAg

[1416] 1. The T cells are obtained from either lymph nodes draining GM-CSF transduced tumor cell immunization or peripheral blood and subdivided into CD4+CD8+ (T cell) and CD4-CD8− (NKT cell) populations.

[1417] 2. SAg enterotoxin B is added to cultures of the NKT and T cell populations for 48 hours.

[1418] 3. The NKT cells and T cells are further expanded for an additional 72 hours (optional).

[1419] SAg Activated NKT and/or T Cell Administration

[1420] 1. The CD4+CD8+ (T cell) and CD4-CD8− (NKT) populations are harvested for injection into patients.

[1421] 2. T cells or NKT cells are administered with a mean 1011 cells per patient.

[1422] Assessment:

[1423] 1. T cells phenotypes for NKT cell markers, V expression, CD44, CD62 are carried out on lymph node and peripheral blood T cells or NKT cells immediately after their removal and at various intervals after ex vivo SAg stimulation and expansion.

[1424] 2. Tumor and DTH assessment are as described in the Phase I Protocol on GM-CSF Transduction [Human Gene Therapy 6: 347-368 (1995)].

[1425] Patient Evaluation

[1426] Assessment of response of the tumor to the therapy is made once per week during therapy and 30 days thereafter. Depending on the response to treatment, side effects, and the health status of the patient, treatment is terminated or prolonged from the standard protocol given above. Tumor response criteria are those established by the International Union Against Cancer and are listed in Table VII.

TABLE VII

| RESPONSE | DEFINITION |
|---|---|
| Complete remission (CR) | Disappearance of all evidence of |
| | disease |
| Partial remission (PR) | >50% decrease in the product of |
| | the two greatest perpendicular |
| | tumor diameters; no new lesions |
| Less than partial remission | 25-50% decrease in tumor size, |
| (<PR) | stable for at least 1 month |
| Stable disease | <25% reduction in tumor size; no |
| | progression or new lesions |
| Progression | >25% increase in size of any one |
| | measured lesion or appearance of |
| | new lesions despite stabilization |
| | or remission of disease in other |
| | measured sites |

[1427] The efficacy of the therapy in a population is evaluated using conventional statistical methods including, for example, the Chi Square test or Fisher's exact test. Long-term changes in and short term changes in measurements can be evaluated separately.

[1428] Results: One hundred and fifty patients are treated. The results are summarized in Table VIII. Positive tumor responses are observed in 80% of the patients as follows:

TABLE VIII
All Patients

| Response | No. | % |
|---|---|---|
| PR | 20 | 66% |
| <PR | 10 | 33% |

| Tumor Types | Response | % of Patients |
|---|---|---|
| Breast Adenocarcinoma | PR +< PR | 80% |
| Gastrointestinal Carcinoma | PR +< PR | 75% |
| Lung Carcinoma | PR +< PR | 75% |
| Prostate Carcinoma | PR +< PR | 75% |
| Lymphoma/Leukemia | PR +< PR | 75% |
| Head and Neck Cancer | PR +< PR | 75% |
| Renal and Bladder Cancer | PR +< PR | 75% |
| Melanoma | PR +< PR | 75% |

### EXAMPLE 24

### Preparation of DCs

[1429] Splenocytes obtained from naive C57BL/6 females are treated with ammonium chloride Tris buffer for 3 min at 37° C. to deplete red blood cells. Splenocytes (3 ml) at 2×10⁷ cells/ml are layered over 2 ml metrizamide gradient column (Nycomed Pharma AS, Oslo, Norway; analytical grade, 14.5 g added to 100 ml PBS, pH 7.0) and centrifuged at 600 g for 10 mm. The DC-enriched fraction from the interface is further enriched by adherence for 90 mm. Adherent cells (mostly DC and a few contaminating macrophages) are retrieved by gentle scraping and subjected to a second round of adherence at 37° C. for 90 min to deplete the contaminating macrophages. Non-adherent cells are pooled as splenic DC, and by FACS® analysis are ˜80-85% DC (stainwith mAb 33D1), 1-2% macrophages (stain with mAb F4/80), 10% T cells, and <5% B cells. The pellet is resuspended and enriched for macrophages by two rounds of adherence at 37° C. for 90 mm each. More than 80% of the adherent population is identified as macrophages by FACS® analysis with 5% lymphocytes and <5% DC. B cells are separated from the non-adherent population (B and T cells) by panning on anti-Ig-coated plates. The separated cell population which is comprised of >80% T lymphocytes by FACS analysis is used as responder T cells.

[1430] Generation of Bone Marrow-Derived DCs

[1431] Erythrocyte depleted mouse bone marrow cells from flushed marrow cavities are cultured in CM with 10 ng/ml GM-CSF and 10 ng/ml IL-4 at 106 cells/ml. On day 7, DCs are harvested by gentle pipetting and are enriched by 14.5% (by weight) metrizamide (Sigma) CM gradients. The low density interface containing the DC is collected by gentle pipette aspiration. The floating DCs express CD11b, CD11c, CD86, DEC205, MHC class I and II and CD40. They are negative or low for CD3 and B220 expression.

[1432] DC Cultures

[1433] Mouse BM-DCs are prepared in CM with IL-4 and GM-CSF (1000 IU/ml each). The DC are washed twice with CM, enumerated purity >90% by positive coexpression of MHC class II, CD40, CD80, CD86, and CD11c by fluorescence-activated cell sorter (ACS)], and cultured in CM with added cytokines for further studies. Human-monocyte-derived DCs are obtained from the adherent fraction of mononuclear cells of healthy volunteers and are incubated 7-8 days in AIMV containing L-Glu, antibiotics and rhIL-4 and rhGM-CSF (1000 IU/ml each, Schering Plough, Kenilworth, N.J., USA). After 8 days in culture, the loosely adherent or floating cells show typical dendritic morphology, express high levels of MHC class I and II molecules, CD40 and CD86; most are positive for CD1a and CD11c but low or negative for CD2, CD3, CD14, CD19 and CD83.

### EXAMPLE 25

### Preparation of DC/Tumor Cells Hybrids (DC/tc)

[1434] DCs derived from BM culture are fused with tumor cells at a 3:1 (DC:tumor cell) ratio using polyethylene glycol (PEG; MW=1450)/DMSO solution (Sigma). In brief, tumor cells are cultured in CM supplemented with 20% FCS and 1×OPI solution (oxaloacetate, pyruvate, and insulin; Sigma) for 4-6 h before fusion. Tumor cells and DCs are then mixed and washed with serum-free medium. After removing the medium, 1 ml of PEG is added to the cell pellet while resuspending the cells by stirring for 2 min. An additional 10 ml of serum-free medium is added to the cell suspension over the next 3 min. with continued stirring. The cells are centrifuged at 400×g for 5 mm. The cells are resuspended with 20% FCS CM and cultured for 24 h before staining or being used as targets or vaccines. Fusion preparations of DCs with B16 or RMA-S are termed B16/DC and RMA-S/DC, respectively.

[1435] Phenotype Staining of Fused Hybrid Cells

[1436] B16, RMA-S, DCs, and their fused hybrids are analyzed by staining with FITC- or PE-conjugated mAbs (PharMingen) against MHC antigens (D^{b}, K^{b}, IA^{b}) adhesion and costimulatory molecules (B7.1, ICAM-1) and lymphocyte antigens (Thy-1.2, SmIg) at 4° C. for 45 min. DCs were identified by labeling with mAb against CD11c (N418). B16, B16/DC or B16/B16 fused cells are stained with mAb against AKV Env gp85 protein (M562, provided by Dr. Masaru Taniguchi, Chiba University, Tokyo, Japan) as a B16 tumor-specific marker. RMA-S and RMA-S/DC fused cells are stained with Thy-1.2 or mAb against the R-MuLV-encoded Gag p12 protein (584, provided by Dr. Bruce Chesebro, National Institute of Allergy and Infectious Diseases, Hamilton, Mo.) as RMA-S tumor-derived markers. The method for labeling cells with TRITC (rhodamine) is described. Briefly, cells are resuspended in RPMI 1640 at 106 cells/ml and incubated with TR1TC (0.5g/ml) in 37° C. for 45 mm. The labeled cells are washed three times and used for fusion studies. The phenotypes of fresh and cultured LN T cells is determined by FACS analysis following staining with FITC- or PE-conjugated mAbs against Thy-1.2, Lyt-2, and L3T4 (PharMingen). All cells are washed twice with HBSS and fixed with 0.2% paraformaldehyde. Fluorescence intensity and positive cell percentage were measured on a FACScan flow microfluorometer (Becton Dickinson, Sunnyvale, Calif.).

[1437] Additional Fusion Methods

[1438] Murine (CS 7BL16) MC38 adenocarcinoma cells are stably transfected with the DF3/MUCI cDNA (MC38/MUC1). MC38, MC38/MUC1 and the syngeneic MB49 bladder cancer cells are maintained in DMEM supplemented with 10% heat-inactivated fetal calf serum (FCS), 2 mM glutamine, 100 U/ml penicillin and 100 mg/ml streptomycin. DCs are obtained as described from bone marrow culture with certain modifications. Briefly, bone marrow is flushed from long bones, and red cells are lysed with ammonium chloride. Lymphocytes, granulocytes and Ia⁺ cells are depleted from the bone marrow cells by incubation with the following mAbs: (1) 2.43, anti-CD8 (TIB 210; American Type Culture Collection, Rockville, Md.); (2) GK1.5, anti-CD4 (TIB 207); (3) RA3-3A1/6.1, anti B220/CD45R (TIB 146); (4) B21-2, anti-Ia (TIB 229); and (5) RB6-8C5, anti-Gr-1 (PharMingen, San Diego, Calif.) and then rabbit complement. The cells are plated in six-well culture plates in RPMI 1640 medium supplemented with 5% heat-inactivated FCS, 50 M 2-mercaptoethanol, 1 mM HEPES (pH 7.4), 2 mM glutamine, 10 U/ml penicillin, 100 mg/ml streptomycin and 500 U/ml recombinant murine GM-CSF (Boehringer Mannheim, Indianapolis, Ind.). At day 7 of culture, nonadherent and loosely adherent cells are collected and replated in 100-mm petri dishes (10⁶ cells/ml; 8 ml/dish). The nonadherent cells are washed away after 30 mm of incubation, and GM-CSF in RPMI medium is added to the adherent cells. After 18 h, the nonadherent cell population is removed for fusion with MC38/MUC1 or MC38. Fusion is carried out with 50% PEG in Dulbecco's PBS without Ca²⁺ or Mg²⁺ at pH 7.4. The fused cells are plated in 24-well culture plates in the presence of HAT medium (Sigma) for 10-14 days. HAT slows proliferation of MC38/MUC1 and MC38, but not the fused cells. MC38/MUC1 and MC38 cells grow firmly attached to the tissue culture flask, while the fused cells are dislodged by gentle pipetting.

[1439] Flow Cytometry

[1440] Cells are washed with PBS and incubated with mAb DF3 (anti-MUCI), mAb M1/42/3.9.8 (anti-MHC class I), mAb M5/114 (anti-MHC class II), mAb 16-IOA1 (anti-B7-1), mAb GL1 (anti-B7-2) or mAb 3E, (anti-ICAM-1) for 30 mm on ice. After washing with PBS, the appropriate fluorescein isothiocyanate (FITC)-conjugated anti-hamster, -rat and -mouse IgG is added for another 30 mm on ice. Samples are then washed, fixed and analyzed in a FACScan (Becton Dickinson, Mountain View, Calif.).

[1441] Fusion of SAg Transfected Tumor Cells with Dendritic Cells Preparation of Dendritic Cells

[1442] Dendritic cells were generated from mouse bone marrow cultures of B6 mouse origin, following the protocol provided by W. Storkus, et al. Bone marrow cells were prepared from the femurs of four 8 week old normal C576L/6 (denoted B6, H 2^{b}) mice.

[1443] 1. For all steps, a complete medium consisting of RPMI 1640 media supplemented with 10% heat-inactivated FCS 0.1 mM NEAA 1 mM sodium pyruvate, 50 mM 2-mercaptoethanol, 50 mM HEPES, 2 mM glutamine, 100 U/ml penicillin, and 100 U/ml streptomycin was used.

[1444] 2. Following removal of both femurs from each of four mice, cells were extruded by use of a 3 cc syringe filled with complete medium and 25 G needle. Clumps were removed by passing the cell suspension through a Cell Strainer (Falcon 2350). The cell suspension was then centrifuged at 600×g for 5 minutes at room temperature (all further centrifugations were performed in this manner unless otherwise indicated).

[1445] 3. Red blood cells were lysed by resuspending the cells in 4 ml of Red Blood Cell Lysing Solution (Sigma R7757) and incubating the tube on ice for 2 minutes. After neutralizing the ammonium chloride action with complete medium, the cells were centrifuged to pellet them.

[1446] 4. Granulocytes and leukocytes were depleted from the bone marrow cells by incubation in 2 ml of a cocktail of monoclonal antibodies from Pharmingen, formulated to contain no azide and have low endotoxin levels. The cocktail consisted of 5 mg/ml of the following monoclonal antibodies (1) 2.43, anti-CDS, Pharmingen 01050D (2) GK 15, anti-CD4, Pharmingen 094200 (3) RA3-3A1/6. 1, anti-B220/CD45R, Pharmingen 01120D (4) anti GRI, Pharmingen 01210D. Antibodies were diluted in complete medium, cells were then resuspended in the cocktail and incubated for one hour on ice. After diluting the cell suspension to 30 ml with complete medium, the cells were centrifuged to pellet them.

[1447] 5. Cells were then resuspended in 12 ml of a 1:8 dilution of low endotoxin rabbit complement (Accurate Chemicals, ACL-3051) which had first been reconstituted in sterile water. The cell suspension was incubated in complement for 30 minutes in a 37° C. water bath. Cells were diluted in complete medium and washed twice by centrifugation before resuspending them in 5 ml of complete medium for counting.

[1448] 6. The cell concentration was adjusted to 3.3×10⁵ cells/ml in complete medium containing 10 ng/ml IL-4 (Sigma) and 10 ng/ml recombinant murine GM-CSF (Boehringer Mannhaim) and plated at 3 ml/well in 6 well culture plates.

[1449] 7. Cultures were refed on day 5 by removal and replacement of half the medium. This step was repeated as needed.

[1450] 8. At day 6 of culture, an aliquot of non-adherent and loosely adherent cells was collected and stained with antibody for N418 antigen (CD11c), a dendritic cell marker, using phycoerythrin (PE) labeled antibody. PE labeled antibody to an irrelevant antigen (TNP) served as the negative control.

[1451] 9. Cultures were maintained until they were used for fusion with tumor cells.

[1452] 10. Staining and FACs analysis revealed approximately 75% of the population to be CD11c positive.

[1453] Fusion of Dendritic cells with SEB Transfected B16 F10 Melanoma Cells

[1454] One SEB positive clone (clone 11.2) and one vector containing clone (clone 7.5) were maintained in complete medium supplemented with 50 mg/ml G418 and 0.5 mg/ml fungizone.

[1455] 1. Fusion of dendritic cells with the transtected B16F10 tumor cells, were carried out using preparations from seven and fourteen day cultures of dendritic cells.

[1456] 2. Fusion of the dendritic cells and tumor cells (either SEB transfected or control vector) was carried out at a 3:1 ratio with PEG (1450 mwt) DMSO (Sigma P7306). Mock fusion consisted of mixing dendritic cells with SEB-transfected cells in the same ratio as used for fusion without PEG-DMSO. In a secpmd experiment, fusion of the dendritic cells and the tumor cells was carried out at a 5:1 ratio.

[1457] 3. Four to 6 hours before fusion, tumor cells were cultured in complete medium (see dendritic cell preparation) supplemented with 20% FCS and 1×OPI solution (oxaloacetate, pyruvate, and insulin, Sigma). Tumor cells and dendritic cells were mixed and washed three times with serum-free medium, After removing the medium, 1 ml of PEG was added to the cell pellet while resuspending the cells by stirring for 2 min. An additional 10 ml of serum-free medium was added to the cell suspension over the next three minutes with continued stirring. The cells were centrifuged at 400×g for 5 min. and resuspended with complete medium 20% FCS. Cell suspensions were cultured in bulk cultures.

[1458] 4. In order to eliminate the melanoma cells remaining in the bulk culture, differential adherence subculturing was performed. Cultures were “fractionated” into nonadherent (transfer of the upper half the culture medium with floating cells), loosely adherent (transfer of cells resuspended by gentle pipeting), and adherent (cells requiring trypsinization to recover). Cells transferred to fresh cultures were refed with complete medium containing 20% FCS. Subculturing was performed every 2-3 days or as needed for approximately two weeks.

[1459] 5. Analysis of dendritic cell-melanoma cell fusions to detect CD11c positive cells was performed on cultures approximately 2 weeks after fusion. Cells were plated at 2×10⁴cells/well in four well slide cultures. After three days in cultures, cells were stained with either antibody to N418 antigen (CD11c), a dendritic cell marker, using phycoerythrin (PE) labeled antibody or PE labeled antibody to an irrelevant antigen (TNP) as the negative control. After washing with PBS, the cells were incubated for 30 minutes on ice in PBS with 10%FBS and Fc-Block (Pharmingen 01241D). Five μl/well of the appropriate antibody was added to the wells and the staining was carried out by incubating the slides for 30 minutes on ice. After three washes in PBS, cells were fixed with 2% paraformaldehyde. The remaining cells were frozen for permanent storage.

### EXAMPLE 26

### Transfection of Hybrid DC/tc's with SAg DNA or RNA In Vivo and In Vitro

[1460] The methods for transfecting SAg-encoding nucleic acid into tumor cells disclosed in Examples 1 and 32 are used for transfection of DCs or DC/tc hybrids.

### EXAMPLE 27

[1461] Preparation of DCs which have Phagocytosed SAg-Transfected Tumor Cell Lysates or Apoptotic Tumor Cells

[1462] PBMCs, DCs, macrophages, and T cells are prepared as follows. In brief, peripheral blood is obtained from normal donors in heparinized syringes and PBMCs are isolated by sedimentation over Ficoll-Hypaque (Amersham Pharmacia Biotech, Piscataway, N.J.). T cell-enriched and T cell-depleted fractions are prepared by rosetting with neuraminidase-treated sheep red blood cells. Immature DCs are prepared from the T cell-depleted fraction by culturing cells in the presence of GM-CSF and IL-4 for 7 d. 1,000 U/ml of GM-CSF (Immunex Corp., Seattle, Wash.) and 500-1,000 U/ml of IL-4 (Schering-Plough Corp., Kenilworth, N.J.) are added to the cultures on days 0, 2, and 4. To generate mature DCs, the cultures are transferred to fresh wells on day 7 and MCM is added for an additional 3-4 d. At day 7, >95% of the cells are CD14−,CD83−, HLA-DR^{lo} DCs. On days 10-11, 80-100% of the cells are of the mature CD14−, CD83+, HLA-DRhi phenotype. FACSort® (Becton Dickinson, San Jose, Calif.) is used to generate highly pure populations of immature and mature DCs, based on their CD83− and CD83+ phenotypes, respectively. Macrophages are isolated from T cell-depleted fractions by plastic adherence for 1 h. After 24 h, cells are removed from the plates and placed in Teflon beakers for 3-9 d. T cells are further purified from the T cell-enriched fraction by removing contaminating monocytes, NK cells, and B cells.

### EXAMPLE 28

### Induction of Apoptotic Death and Phagocytosis of Apoptotic Tumor Cells or SAg-Transfected Tumor Cells by DCs

[1463] Monocytes are infected with influenza virus in serum-free RPMI. These cells undergo viral-induced apoptotic death within 6-8 h. Cell death is confirmed using the Early Apoptosis Detection kit (Kayima Biomedical Co., Seattle, Wash.). As previously described, cells are stained with Annexin V-FITC (Ann V) and propidium iodide (PI). Early apoptosis is defined by Ann V+/PI staining as determined by FACScan® (Becton Dickinson). Five to eight h after infection, monocytes first externalize PS on the outer leaflet of their cell membrane, as detected with Ann V. By 8-10 h, these cells are TUNEL (Tdt-mediated dUTP-biotin nick-end labeling) positive. It is not until 24-36 h that the majority of the monocyte population included trypan blue into the cytoplasm, an indicator of secondary necrosis. HeLa cells are triggered to undergo apoptosis using a 60 UV lamp (Derma Control Inc.), calibrated to provide 2 mJ/cm²/s.

[1464] Induction and Detection of Apoptosis

[1465] Monocytes are infected with influenza virus in serum-free RPMI. Cell death is assayed using the Early Apoptosis Detection kit (Kayima Biomedical). Briefly, cells are stained with Annexin V-FITC (Ann V) and propidium iodide (P1). Early apoptosis is 14 defined by Ann V+/PI− staining as determined by FACScan (Becton Dickinson). Cells from the 293 cell line are triggered to undergo apoptosis using a 60 UVB amp (Derma Control Inc.), calibrated to provide 2 mJcm⁻²s⁻¹.

[1466] Phagocytosis of Apoptotic Cells

[1467] Monocytes and HeLa cells are dyed red using PKH26-GL (Sigma Biosciences, St. Louis, Mo.), and induced to undergo apoptosis by influenza infection and UV irradiation, respectively. After 6-8 h, allowing time for the cells to undergo apoptosis, they are cocultured with phagocytic cells that were dyed green using PKH67-GL (Sigma Biosciences), at a ratio of 1:1. Macrophages are used 3-6 d after isolation from peripheral blood; immature DCs are used on days 6-7 of culture; and mature DCs are used on days 10-11. Where direct comparison of cells is needed, cells are prepared from the same donor on different days. In blocking experiments, the immature DCs are preincubated in the presence of 50 mg/ml of various mAbs for 30 mm before the establishment of cocultures. After 451 20 mm, FACScan® analysis is performed and double positive cells were enumerated.

[1468] Coculture of DCs with Apoptotic Cells

[1469] Monocytes from HLA-A2.1-donors are infected with live or heat-inactivated influenza virus. Live influenza virus (Spafas Inc.) is added at a final concentration of 250 HAU ml-1 (MOI of 0.5) for 1 h at 37° C. Virus is heat-inactivated by treatment for 30 min at 56° C. before use. After washing, cells are added to 24-well plates in varying doses. After 1 h, contaminating non-adherent cells are removed and fresh media is added. Following a 10 h incubation at 37° C., 3.3×10³ uninfected DCs and 10⁶ T cells are added to the wells.

[1470] Antigen Pulsing of DC

[1471] Day 7 DC are incubated with freeze-thawed tumor lysates at a ratio of three tumor cell equivalent to one DC (i.e., 3:1) in CM. After 18 hr of incubation, DC are harvested, irradiated with rad (Gamma Cell 1000; Nordion, Kanata, Canada), washed twice in Hank's balanced salt solution (GIBCO), and in Hank's balanced salt solution.

### EXAMPLE 29

[1472] Treatment of Tumor Bearing Animals with SAg-Transfected or SAg-Expressing DCs, Accessory Cells or S/D/t Cells: Vaccination Protocols and Treatment of Established Tumor

[1473] Immunotherapy

[1474] C57BL/6 mice are immunized once with irradiated, S/D/t cells (2×10⁶ cells/mouse) 10-14 d post-immunization mice are challenged with 2×10⁷ live tumor cell subcutaneously in the scapular region. Mice are monitored on a regular basis for tumor growth and size. Mice with tumor sizes >3.5 cm were killed. All survivors were killed 40 d post-challenge.

[1475] P10.9-B 16 Melanoma Model

[1476] Mice are injected intra-footpad with 2×10⁵ F10.9 cells. Legs are amputated when the local tumor in the footpad is 7-8 mm in diameter. Post-amputation mortality is less than 5%. 2 d post-amputation mice are immunized intraperitoneally with S/D/t cells followed by weekly vaccinations twice, for a total of three vaccinations. Mice are killed based on the metastatic death in the non-immunized or control groups (28-32 d post-amputation). Metastatic loads are assayed by weighing the lungs.

[1477] S/D/t cells: In Vivo Immunization and Tumor Challenge

[1478] B6 or BALB/c mice are immunized s.c. in the right flank with 10⁶ MCA-207 or 10⁶ S/D/t cells, respectively, twice at 7-day intervals. Mice then are rechallenged 7 days after the last immunization with a lethal dose of 10⁵ MCA-207 (for B6 mice) or 3×10⁵ MT-901 (for BALB/c mice) viable tumor cells by s.c. injections into the left flank. The size of the tumors is assessed in a blinded, coded fashion twice weekly and recorded as tumor area (in square mm) by measuring the largest perpendicular diameters with calipers. Data are reported as the average tumor area SEM (five or more mice per group).

[1479] Vaccination Protocol

[1480] B6 mice are s.c. immunized twice in a 2-wk interval with 10⁶ irradiated (15,000 rad) B16, B16 mixed with DCs (1/1: unfractionated cells from overnight culture), or S/D/t cells or recombinant formalin fixed bacteria (10⁶-10⁸). Ten days following the final immunization, each group of mice is injected s.c. with varying doses (10⁴, 10⁵, or 10⁶ cells/mouse) of viable B16. Tumor growth and survival time of each group of mice are recorded. The size of the tumor in each mouse is measured in two perpendicular dimensions with a Vernier caliper twice weekly after tumor challenge. Tumor incidence is considered positive when the average diameters of the tumor exceeded 3 mm.

[1481] In Vivo Immunization for Treatment of Pulmonary Metastases

[1482] B6 or BALB/c mice receive 1.5×10⁵ MCA-207 or 2×10⁵ MT-901 viable tumor cells, respectively, i.v. in the lateral tail vein to establish pulmonary metastases, as described. The mice then are immunized s.c. with, respectively, 10⁶ MCA-207 tumor lysate-pulsed S/D/t cells three times on days 3, 7, and 11 or 10⁶ MT-901 tumor lysate-pulsed S/D/t cells twice on days 3 and 7 after tumor injection and are killed on days 14 and 17, respectively. Pulmonary metastases are enumerated on day 15 (MCA-207) or 14 (MT-901). Data are reported as the mean number of metastases±SEM (five or more mice per group).

[1483] In Vitro Activation of LN T Cells

[1484] B6 mice are immunized s.c. twice in a 2-wk interval on the flanks with 2×10⁶ (10⁶/side) irradiated (15,000 rad) tumor, S/D/t cell preparation, or tumor mixed with DCs (1/1) suspended in 0.1 ml of HBSS. One week after the final immunization, inguinal LNs from each group of mice are harvested. LN cells from each group of mice are activated and expended in culture using anti-CD3 plus IL-2. In brief, LN cells (3-4×10⁶ cells/well) are activated on 24-well plates coated with anti-CD3 mAb (145-2C11) and incubated at 37° C. for 2 days. Alternatively, S/D/t cells (10⁴-10⁵/well 5 g) or recombinant bacteria (10⁶-10⁸/well) are incubated with the LN cells for 2 days and optionally with low dose IL-2 for an additional 2 days. The activated cells are suspended at 1-2×10⁵ cells/ml in CM containing IL-2 (4 U/ml) and incubated in gas-permeable culture bags (Baxter Healthcare, Deerfield, Ill.) for an additional 3 days. The derived LN T cells are harvested and used as effector cells for adoptive immunotherapy.

[1485] Adoptive Immunotherapy Models

[1486] For therapy of B 16 pulmonary metastases. B6 mice are injected i.v. with 10⁵ live B16 tumor cells in 1 ml of PBS to initiate pulmonary metastases. Three days after tumor inoculation, mice are randomly divided into several groups to receive treatments by i.v. injection of 5×10⁷ cultured LN T cells suspended in 1 ml of PBS. On day 21 after tumor inoculation, mice from each group are killed, and lungs are insufflated with Fekete's solution. Lung metastases are counted. In some experiments. tumor-bearing mice are i.p. administered IL-2 (15,000 U. twice/day for 5 days) following the adoptive transfer of cultured LN T cells. For therapy of FBL-3 tumor. B6 mice are inoculated i.p. with 5×10⁶ viable FBL-3 tumor cells on day 0. By day 5, the tumor is disseminated, and mice are treated with cyclophosphamide (CY) at a dose of 180 mg/kg followed in 6 h by i.p. injection of cultured LN T cells (5×10⁷ cells/mouse) suspended in 0.5 ml of PBS. The tumor growth and the survival time of each group of mice are monitored and recorded on a regular basis.

[1487] Induction of Anti-Tumor Activity by FC/MUC1.

[1488] Groups of 1 mice are immunized twice at 14-day intervals by subcutaneous injection of 3×10⁵ DCs (0) or S/D/t cells represented by FC/MUC1cells. PBS is injected as a control (0). After 14 days, mice are challenged subcutaneously with 2.5×10⁵ MC38/MUC1 cells. Tumors of 3 mm in diameter are scored as positive.

[1489] Immunization with FC/MUC1 for Prevention and Treatment of Pulmonary Metastases

[1490] Groups of 10 mice are injected twice with S/D/t cells represented by FC/MUC1cells or PBS and then challenged after 14 days with intravenous administration of 10⁶ MC38/MUC1 cells. The mice are killed 28 days after challenge. Pulmonary metastases are enumerated after staining the lungs with India ink. Groups of 10 mice are injected intravenously with 10⁶ MC38/MUC1 or MC38 cells. The mice are immunized with 10⁶ S/D/t cells representing FC/MUC1 cells or FC/MC38 at 4 and 18 days after tumor challenge and then killed after an additional 10 days. Pulmonary metastases are enumerated for each mouse.

[1491] Protection Assays

[1492] C57BL/6 mice are immunized with the indicated antigen-gene construct. Animals are challenged with tumors and evaluated for tumor survival as described. Briefly, 7 days after the final immunization (day 0), immunized animals are challenged by intradermal injection in the mid-flanks bilaterally with melanoma cells (2×10⁴) at two times the dose lethal to 50% of the animals tested (LD50). Survival is recorded as the percentage of surviving animals. Melanoma cells for injection are washed three times in PBS. Injected cells were greater than 95% viable by trypan blue exclusion. All experiments include five mice per group and were repeated at least three times. Mice that became moribund were killed according to animal care guidelines.

### EXAMPLE 30

### DNA or RNA from SAg Transfected Tumor Cells, SAg Transfected DCs and SAg Transfected DC/tc Hybrids for In Vivo Vaccination and Transfection of Naive DCs to Produce a DC Expressing SAgs and Tumor Associated Antigens

[1493] Plasmid DNA Vector

[1494] 1. Genes from SAg Transfected Tumor Cells, SAg transfected DCs and S/D/t cells are cloned by PCR to contain a partial or entire coding region. In most cases, it is desirable to not include any sequence 5′ to the ATG or 3′ to the termination codon. PCR primers are designed to contain a restriction site, such as BgIII or BamHI.

[1495] 2. The PCR fragments are separated from unreacted oligomers and template and then the fragment is cut with an excess of BgIII for at least 5 h. The DNA is Phenol extracted and ethanol-precipitated. The purified cut fragment is resuspended in TE, pH 8.0 and ligated. to BgIII-digested V1J, which has been gel-purified and dephosphorylated with calf intestinal alkaline phosphatase (CLAP), phenol-extracted, ethanol-precipitated, and resuspended in TB, pH 8.0. A 6:1 molar ratio of insert:vector in the ligation reaction is used.

[1496] 3. Competent E. coli cells (e.g., DH5, DH5a) are transformed with the ligation reaction, plated on L-ampicillin plates and grown overnight at 37° C. Colonies are screened by hybridization of plate lifts to kinase-labeled PCR primer. Several hybridization-positive colonies are selected and grown in overnight cultures for miniprep purification.

[1497] 4. Miniprep DNAs, are prepared and cut with the appropriate restriction enzymes to determine correct orientation of the gene in the vector. At least three DNAs with the gene in the correct orientation are selected to confirm by sequencing across the ligation junctions. Sequencing primers are designed from the vector sequence. Each primer is 30-50 bp from. the restriction site (BgIII in the example), so that 10-20 bases within the vector can be read as well as 150-200 bases within the gene. This amount of sequence verifies orientation and give a reasonable estimate of the quality of the PCR-generated gene.

[1498] 5. DNA preparations that have been sequence-verified 1/1000 in TB, pH 8.0, are diluted and use to retransform competent E. coli. Three isolated colonies from the transformation plates are grown overnight at 37° C., and used to make a −70° C. cell stock by adding 0.8 ml fresh overnight growth to 0.2 ml sterile 80% (v/v) glycerol, mixing well, and freezing on dry ice. The −70° C. stocks are used to isolate plasmid DNA from remaining cells by miniprep procedures. Miniprep DNA is cut again with the appropriate restriction enzymes, and visualized on a gel to verify the construct. All subsequent growth of cells for plasmid production are made from the −70° C. frozen stock.

[1499] All constructs are tested in vitro to validate their ability to express the desired gene product. Plasmids purified by column (Wizard preps, Promega, Madison, Wis.) or by cesium chloride banding are used to transfect tissue-culture cells transiently. Protein expression is detected by immunoblot. This check not only verifies expression but can validate the size and immunoreactivity of the gene product.

[1500] Characterization of Plasmid DNA Vectors

[1501] All constructs are tested in vitro to validate their ability to express the desired gene product. Plasmids purified by column (Wizard preps, Promega, Madison, Wis.) or by cesium chloride banding are used to transfect tissue-culture cells transiently. Protein expression is detected by immunoblot. This check not only verifies expression but can validate the size and immunoreactivity of the gene product.

[1502] Cell Growth and Transfection

[1503] 1. DC /tumor cell hybrids, at 0.8-1.5×10⁶ cells/100 mm plate in Dulbecco's Modified Eagle's Medium (DMEM) supplemented with 10% heat-inactivated fetal bovine serum, 20 mM HEPES, 4 mM L-glutamine, and 100 mg/ml each of penicillin and streptomycin, and incubate at 37° C. in 5% CO2 for 18 h.

[1504] 2. The construct to be tested is cotransfected with 10 mg/plate and 10 g of V1J-CAT using a calcium phosphate procedure or other methods given in Example 1.

[1505] 3. Five hours after transfection, the cells are shocked in 15% (v/v) glycerol in PBS, pH 7.2, for 2.5 mm.

[1506] 4. Cultures are harvested 72 h after transfection by washing the plates twice with 10 ml of cold PBS, pH 7.2, then adding 5 ml of cold TEN buffer and scraping.

[1507] 5. Pellet cells and use immediately or store at −70° C. for subsequent analysis.

[1508] Immunoblot Analysis

[1509] 1. Cell pellets are lysed in Single Detergent Lysis Buffer, and sonicate on ice (2-15 s bursts) to reduce viscosity.

[1510] 2. Cell debris is removed by sedimentation and determine soluble protein concentrations of the supernatants by the Bradford method.

[1511] 3. Equal loadings of soluble cell protein per lane are run on SDS-polyacrylamide gel and transfer the proteins to Immobilon P (Millipore, Bedford, Mass.) membrane.

[1512] 4. Western blots are incubated overnight with an appropriate dilution of the antibody to the gene product being tested, followed by a 1.5-h reaction with a 1:1000 dilution of peroxidase-conjugated secondary antibody. Develop blots using the ECL kit (Amersham, Arlington Heights, Ill.).

[1513] Large-Scale DNA Preparations

[1514] 1. Expression vectors are grown in E. coli strain DH5 with vigorous aeration in 500 ml growth medium/1-L shake flask. V1J constructs are grown overnight to saturation.

[1515] 2. Cells are harvested and lysed by a modification of the alkaline SDS procedure. The modification consists of increasing the volumes threefold for cell lysis and DNA extraction.

[1516] 3. DNA is purified by double banding on CsC1/ethidium bromide gradients.

[1517] 4. The ethidium bromide is removed by 1-butanol extraction, and the resulting DNA is extracted with phenol/chloroform and precipitated with ethanol.

[1518] 5. DNA in TE for transfections is resuspended and in 0.9% NaCl for injection into mice.

[1519] 6. The concentration and purity of each DNA preparation is determined by A 260/280 readings. The 260/280 ratios are >1.8.

[1520] 7. DNA is stored in small aliquots at −20° C.

### EXAMPLE 31

### DNA Immunization In Vivo

[1521] 1. Animals are housed in an American Association for the Accreditation of Laboratory Animal Care (AAALAC) accredited facility or other national facility and cared for in accordance with the Guide for the Care and Use of Laboratory Animals. Prior to bleeding, or administration of anesthetic or inoculation, animals are in good physical condition and free from stress.

[1522] 2. For administration of DNA vaccines, animals are anesthetized by ip injection of a solution containing ketamine and xylazine (50 and 20 mg/g body wt, respectively) in a total volume of 0.3 ml of saline. Alternatively, transiently immobilize mice for a sufficient period of time to administer an im injection by allowing inhalation of metophane. Larger animals, such as ferrets or nonhuman primates, are anesthetized using ketamine (30 mg/kg)/xylazine (2 mg/kg)/atropine (1 mg/kg) or ketamine (10 mg/kg), respectively.

[1523] 3. Fully anesthetized animals are prepared for injection by flooding and swabbing the injection site with ethanol (70%). This provides sterilization and, for small animals, such as mice, facilitates visualization of the muscle groups. To visualize small muscles further, fur around the injection site is shaved followed by ethanol swabbing, or a short incision can be made to permit direct observation of the muscle. In the latter case, the incision is sutured after inoculation.

[1524] 4. DNA vaccines are administered in saline solution alone or together with a facilitator that induces muscle generation or regeneration. Facilitators are used in animals that may not necessarily be used in humans. For mice, volumes of up to about 50 mL are injected into each quadriceps muscle using a disposable insulin syringe equipped with a 27-gauge needle and having a capacity of 0.3 ml.

[1525] 5. DNA vaccines are also administered using particle bombardment technology. Plasmid DNA is coated onto gold beads and propelled directly into tissue. Genetic immunization is accomplished by biolistic bombardment using methods similar to those recently described. Briefly, DNA-coated gold particles are prepared by combining 50 mg of 0.95 um gold beads and 100 l of 0.1 M spermidine and sonicating for 5 s. Plasmid DNA (100 mg) and CaCl (200 ml) are added sequentially to the beads spinning in a vortex; mixer. This mixture is allowed to precipitate at room temperature for 5-10 mm. The bead preparation is then centrifuged (10,000 r.p.m. for 30 s) and washed 3 times in cold ethanol before resuspension in 7 ml of ethanol to give a final concentration of 7 mg gold per milliliter. The solution is then loaded into Tefzel tubing (Agracetus, Middleton, Wis.) and allowed to settle for 5 mm. The ethanol is removed and the beads are attached to the side of the tubing by rotation at 20 r.p.m. for 30 s and N₂ dried. The dried tubing lined with beads is then cut into 0.5-inch sections and stored for use with desiccant in parafilm-sealed vials. Animals are vaccinated by delivery of two shots (each shot consisted of 0.5 m4j gold beads in 0.5 inch of tubing) to the shaved abdominal region using the Accell gene delivery device (Agracetus) at a discharge pressure of 400 p.s:i. This delivers approximately 1.00 mg/DNA per shot. Animals are immunized with various plasmids In some instances, particles,are coated with the pGREEN LANTERN-1 plasmid (Gibco BRL, Gaithersburg, Md.), which contains the “humanized” reporter gene encoding GFP from the Aequorecia victoria jellyfish. This gene encodes a naturally fluorescent protein requiring no substrates for visualization.

[1526] Formulation of DNA Vaccine

[1527] Saline is the preferred solvent. However, plasmid DNA may also be administered in various other buffer formulations and cationic lipid formulations. Facilitators include anesthetics, such as bupivacaine, and toxins, which are used in conjunction with DNA vaccines. Conventional delivery vehicles are used which facilitate internalization of DNA by cells, protect DNA from digestion by extracellular nucleases, or effect a slow release of DNA; adjuvants are coadministered to provide an additional stimulus for the immune system.

[1528] Dosage and Injection Regimen

[1529] DNA vaccines are effective across a broad dosage range. Protective efficacy is achieved with submicrogram amounts of DNA. With respect to humoral immune responses against HA, there is a direct correlation between magnitude of antibody responses and dose of DNA between 10 ng and at least 100 g. However, perhaps owing to viscosity of the solution and/or distribution of the inoculum in the muscle, administration of DNA at concentrations in excess of 2-4 mg/ml results in decreased immunogenicity with some antigens. Therefore, in mice, doses in excess of 200 g are not practical by im injection. The number of injections also directly correlates with magnitude of immune responses (up to at least three). For the influenza model in mice, we have found that three injections given at 3-wk intervals yield optimal protection. It is likely, however, that dosing and regimen will need to be optimized for each gene and challenge model.

[1530] Site of Injection

[1531] Injection of plasmid DNA into muscle cells is far superior to other cell types in their capacity to internalize DNA and/or express reporter proteins in vivo. However, immune responses also have been generated after id and iv routes of DNA injection. In addition, particle bombardment of DNA results in the transfection of dermal and epidermal cells leading to the generation of immune responses. The relative effectiveness of these different routes of delivery has yet to be tested rigorously. However, direct im injection generates a protective immune responses at doses (100 ng to 1 g) and is preferred in the range used by particle bombardment.

### EXAMPLE 32

### Pulsing DCs with RNA from SAg Producing Bacteria or S/D/t Cells

[1532] Total RNA is isolated from SAg producing bacteria or S/D/t cells by standard methods. Pulsing DCs with RNA from SAg producing bacteria, S/D/t cells or SAg transfected tumor cells is performed in serum-free Opti-MEM medium (GIBCO BRL) for tumor extracts with the following modification RNA (25 gin 250 l Opti-MEM medium) and DOTAP (50 g in 250 l Opti-MEM medium) are mixed in 12×75 mm polystyrene tubes at room temperature for 20 mm. The complex is added to the DCs (25×10⁶ cells/ml) and incubated 37° C. in a water bath with occasional agitation for 25 mm. The cells are washed twice and resuspended in PBS (10⁵ RNA pulsed DCs in 500 l PBS/mouse) for intraperitoneal immunizations. PBS, B16 extract from 10⁵ cells in PBS, or DCs prepared as described above are injected intraperitoneally in a volume of 500 l.

### EXAMPLE 33

### PolyA-Cellular RNA from S/D/t Cells or DCs Transfected with SAg

[1533] Preparation and Immunization Protocols

[1534] Total RNA is isolated from actively S/D/t cells given above as follows. Briefly, 10⁷ cells are lysed in 1 ml of guanidinium isothiocyanate (CT) buffer (4 M guanidinium isothiocyanate, 25 mM sodium citrate, pH 7.0; 0.5% sarcosyl, 20 mM EDTA, 0.1M 2-mercaptoethanol). Samples are vortexed followed by sequential addition of 100 l 3M sodium acetate, 1 ml water saturated phenol and 200 l chloroform/isoamyl alcohol (49:1). Suspensions are vortexed and placed on ice for 15 mm. The tubes are centrifuged at 10,000 g, 4° C. for 20 min and the supernatant is carefully transferred to a fresh tube. An equal volume of isopropanol is added and the samples are placed at −20° C. for at least 1 h. RNA is pelleted by centrifugation as above. The pellet is resuspended in 300 l GT buffer which is then transferred to a microcentrifuge tube. RNA is re-precipitated by adding an equal volume of isopropanol and placing the tube at −20° C. for at least 1 h. Tubes are microcentrifuged at high speed at 4° C. for 20 mm. Supernatants are decanted and pellets are washed once with 70% ethanol. Pellets are allowed to dry at RT and then resuspended in TB (10 mM Tris-HCl, 1 mM EDTA, pH 7.4). Possible contaminating DNA is removed by incubating RNA in 10 mM MgCl2, 1 mM DTT and 50 U/ml RNase free DNase (Boehringer-Mannheim, Indianapolis, Ind.) for 15 min at 37° C. The solution is adjusted to 10 mM Tris, 10 mM EDTA, 0.5% SDS and 1 mg/ml Pronase (Bochringer-Mannheim) followed by incubation at 37° C. for 30 mm. Samples are extracted once with phenol-chloroform and once with chloroform, and RNA was then re-precipitated in isopropanol at −20° C. After centrifugation the pellets are washed with 70% ethanol, air dried, and resuspended in sterile water. Total RNA is quantitated by measuring OD at 260 and 280 nm. OD 260/ 280 ratios are typically 1.65-2.0. RNA is stored at −70° C. PolyA+ RNA is either isolated from total RNA using Oligotex (Qiagen, Chatsworth, Calif.) or directly from tissue culture cells using the Messenger RNA Isolation kit (Stratagene, La Jolla, Calif.) as per manufacturer's protocols.

[1535] Production of In Vitro Transcribed RNA

[1536] The 1.9-kb EcoRI fragment containing the coding region and 3′ un-translated region is cloned into the EcoRI site of pGEM4Z (Promega, Madison, Wis.). Clones containing the insert in both the sense and anti-sense orientations are isolated and large scale plasmid preparations are made using Maxi Prep Kits (Qiagen). Plasmids are linearized with BamHI for use as templates for in vitro transcription. Transcription is carried out at 37° C. for 34 h using the 5P6 MEGAscript In vitro Transcription Kit (Ambion, Austin, Tex.) per manufacturer's protocol and adjusting the GTP concentration to 1.5 mM and including 6 mM m7G(5′)ppp(5′)G cap analogue (Ambion). Template DNA is digested with RNase free DNase I and RNA is recovered by phenol/chloroform and chloroform extraction followed by isopropanol precipitation. RNA is pelleted by microcentrifugation and the pellet is washed once with 70% ethanol. The pellet is air-dried and resuspended in sterile water. RNA is incubated for 30 mm at 30° C. in 20 mM Tris-HCl, pH 7.0, 50 mM KCl, 0.7 mM MnCl2, 0.2 mM EDTA, 100 mg/ml acetylated BSA, 10% glycerol, 1 mM ATP and 5,000 U/ml yeast poly(A) polymerase (United States Biochemical, Cleveland, Ohio). The capped, polyadenylated RNA is recovered by phenol/chloroform and chloroform extraction followed by isopropanol precipitation. RNA is pelleted by microcentrifugation and the pellet is washed once with 70% ethanol. The pellet is air-dried and resuspended in sterile water. RNA is quantitated by measuring OD at 260 and 280 nm and stored at −70° C.

[1537] Pulsing of Antigen-Presenting Cells, Accessory Cells DCs, Tumor Cells or DC/Tumor Cell Hybrids with RNA Derived from S/D/t Cells

[1538] Pulsing of cells with RNA is routinely performed in serum-free Opti-MEM medium (GIBCO BRL). Cells are washed twice in Opti-MEM medium. Cells are resuspended in Opti-MEM medium at 25×10⁶ cells/nil and added to 15 ml polypropylene tubes (Falcon). The cationic lipid, DOTAP, (Boehringer Mannheim) is used to deliver RNA into cells. RNA (in 250-500 l Opti-MEM medium) and DOTAP (in 250-500 p.1 Opti-MEM medium) are mixed in 12×75-mm polystyrene tubes at room temperature (RT) for 20 mm. The amount of polyA+ RNA or IVT RNA used is 5 g and the amount of total RNA used is 25 g. The RNA to DOTAP ratio is 1:2. The complex is added to the APC (2-5×10⁶ cells) in a total volume of 2 ml and incubated at 37° C. in a water-bath with occasional agitation for 2-4 h.

### EXAMPLE 34

### In Vivo Immunization with RNA Derived from “S/D/t Cells” or SAg-Transfected Tumor Cells

[1539] Preparation of mRNA for Transfection

[1540] DNA is linearized downstream of the poly A tail with a 5-fold excess of PstI. The linearized DNA is then purified with two phenol/chloroform extractions, followed by two chloroform extractions. DNA is then precipitated with NaOAc (0.3M) arid 2 volumes of EtOH. The pellet is resuspended at about 1 mg/ml in DEP-treated deionized water.

[1541] A transcription buffer is prepared, comprising 400 mM Tris. HCl (pH 8.0), 80 mM MgCl2, 50 mM DTT, and 40 mM spermidine. The following materials are added in order to one volume of DEP-treated water at room temperature: 1 volume T7 transcription buffer; rATP, rCTP, and rUTP to 1 mM concentration; rGTP to 0.5 mM concentration; 7 g(5′)ppp(5′)G cap analog (New England Biolabs, Beverly, Mass.) to 0.5 mM concentration; the linearized DNA template to 0.5 mg/ml concentration; RNAsin (Promega, Madison, Wis.) to 2000 U/ml concentration; and T7 RNA polymerase (N.E. Biolabs) to 4000 U/ml concentration.

[1542] This mixture is incubated for 1 hour at 37° C. The successful transcription reaction is indicated by increasing cloudiness of the reaction mixture.

[1543] Following generation of the mRNA, 2U RQ1 DNAse (Promega) per microgram of DNA template used is added and was permitted to digest the template for 15 minutes. Then, the RNA is extracted twice with chloroform/phenol and twice with chloroform. The supernatant is precipitated with 0.3M NaOAc in 2 volumes of EtOH, and the pellet is resuspended in 100 mu 1 DEP-treated deionized water per 500 l transcription product. This solution is passed over an RNAse-free Sephadex G50 column (Boehringer Mannheim #100 411). The resultant mRNA is sufficiently pure to be used in transfection of vertebrates in vivo.

[1544] mRNA Vaccination In Vivo

[1545] A liposomal formulation containing mRNA coding for the SAg/tumor associated antigen protein prepared and is inserted into the plasmid pXBG in A volume of 200 l of a formulation is prepared containing 200 mg/ml of S/D/t cell-derived mRNA and 500 mg/ml 1:1 DOTAP/PE in 10% sucrose is injected-into the tail vein of mice 3 times in one day. At about 12 to 14 h after the last injection, a segment of muscle is removed from the injection site, and prepared as a cell lysate according to Example 7. The S/D/t cell-derived specific protein is identified in the lysate.

[1546] Severe combined immunodeficient (SCID) mice (Molecular Biology Institute, (MBI), La Jolla, Calif.) were reconstituted with adult human peripheral blood lymphocytes by injection into the peritoneal cavity according to the method of Mosier (Mosier et al., Nature 335:256 (1988)). The mice were maintained in a P3 level animal containment facility in sealed glove boxes. mRNA coding for the S/D/t cell-derived proteins is prepared by obtaining the S/D/t cell gene in the form of a plasmid removing the gene from the plasmid; inserting the gene into the pXBG plasmid for transcription; and purifying the transcription product S/D/t cell-derived mRNA. The S/D/t cells mRNA is then incorporated into a formulation and 200 l tail vein injections of a 10% sucrose solution containing 200 mg/ml S/D/t cell RNA and 500mg/ml 1:1 DOTAP:DOPE (in RNA/liposome complex form) were performed daily on experimental animals, while control animals were likewise injected with RNA/liposome complexes containing 200 mg/ml yeast tRNA and 500 mg/ml 1:1 DOTAP/DOPE liposomes. At 2, 4 and 8 weeks post injection, biopsy specimens are obtained from injected lymphoid organs and prepared for immunohistochemistry.

[1547] A volume of 200 l-of the formulation, containing 200 mg/ml mRNA from S/D/t cells, and 500mg/ml 1:1 DOTAP:DOPE in 10% sucrose is injected into the tail vein of the human stem cell-containing SCID mice 3 times in one day. Following immunization, the mice are challenged by tumor inoculation.

[1548] The full-length sequence for the cDNA of the S/D/t-derived gene is obtained and ligated to BgIII linkers and then digested with BgIII. The modified fragment is inserted into the BgIII site of PXBG. S/D/t-derived protein is transcribed and purified mRNA is incorporated into a formulation. Balb 3T3 mice are injected directly in the tail vein with 200 l of this formulation, containing 200 mg/ml of S/D/t-derived mRNA, and 500 mg/ml DOTAP in 10% sucrose.

### EXAMPLE 35

### Preparation of “String of Beads” Tumor Antigens for Transfection of SAg-Transfected DCs, Other Accessory Cells, or Tumor Cells

[1549] Generation of rAd

[1550] All cell lines were maintained in Iscove's modified Dulbecco's medium (IMDM) (Scromed, Berlin) supplemented with 4% fetal calf serum (FlyClone), penicillin (110 international units/ml; Brocades Pharma, Leiderdorp, The Netherlands) and 2-mercaptoethanol (20 mM) at 37° C. in a 5% CO2 atmosphere. The adenoviral vector construction adapter plasmid pMad5 is derived from plasmid pMLP10 as follows. pMLP10-lin is constructed by insertion of a synthetic DNA fragment with unique sites for the restriction endonucleases MluI, SplI, SnaBI, SpeI, AsulI, and MunI into the HindIII site of pMLP10. Subsequently, the adenovirus BgIII fragment spanning nucleotides 3328 8914 of the AdS genome is inserted into the MunI site of pMLP-lin. Finally, the SalI-BamHI fragment is deleted to inactivate the tetracycline resistance gene, resulting in plasmid pMad5. A mini-gene cassette vector, pMad5-0. is generated by ligation of the annealed and phosphorylated double-stranded oligonucleotides 1a/b and 2a/b into the MluI and SpeI sites of pMad5. This cloning step leads to elimination of the original MluI and SpeI sites and to creation of a small ORF, which essentially consists of a start codon, the sequence SEOKLISEEDLNN, a human c-Myc-derived sequence, which is recognized by mAb 9E10 and a stop codon. A small “stuffer” sequence. flanked by newly generated MluI and SpeI sites, is present between the start codon and the c-Myc sequence.

[1551] pMad5-1 and -2, each of which harbor a multi-epitope encoding minigene are constructed by unidirectional cloning of the following double-stranded oligonucleotides into pMad5-0, which had been cleaved with MluI and SpeI. pMad5-I. After each cloning step, the sequence of the inserts is verified by DNA sequencing. Expression of these minigenes is driven by the Ad5 major late promoter, which in this configuration is linked to the AdS immediate early enhancer, resulting in immediate early expression of the minigenes.

[1552] rAds are generated through in vivo homologous recombination in the Ad5E 1-transformed helper cell line 911 between plasmid pJMI7. containing the sequence of the AdS mutant d1309, and either of the plasmids pMad5-1 or pMad5-2. 911 cells are transfected with 10 g of plasmid pJMI7 in combination with 10 g of either pMad5-1 or pMad5-2. The rAds are plaque-purified three times, after which the clonal rAds are propagated in 911 cells, purified by double cesium chloride density gradient centrifugation and extensively dialyzed. The presence of replication-competent adenoviruses is routinely checked by infection of Hep-G2 cells. The viral stocks were stored in aliquots with 10% glycerol at −80° C. and titered by plaque assay using 911 cells.

[1553] Further Transfection of SAg-Transfected DCs, Accessory Cells, or Tumor Cells

[1554] In short, 100 ng of plasmid DNA encoding Ad5LI, HPV 16 E7, murine p53 or the influenza-matrix protein are transfected into 10⁴ SAg-transfected DCs, accessory cells or tumor cells. The transfected cells are incubated in 100 ml of IMDM containing 8% fetal calf serum for 48 h at 37° C., after which 1500-500 CTL.??? in 25 ml of IMDM containing 50 Cetus units (=300 international units) of recombinant interleukin-2 (Cetus) are added. After 24 h, the supernatant is collected, and its tumor necrosis factor (TNF) content is determined by measuring its cytotoxic effect on WEHI- 164 clone 13 cells.

### EXAMPLE 36

### Production of Exosomes from DCs Expressing SAg and Tumor Associated Antigens and Normal Hepatocytes

[1555] Exosome Isolation

[1556] SAgs or tumor associated antigens are transfected into tumor cells, DCs, or DC/tc hybrids by methods disclosed herein. The SAg-encoding nucleic acid is provided with sorting sequences which route the translated protein to the endoplasmic reticulum and thereupon to secretory vesicles or exosomes. Alternatively, tumor cells, DCs or DC/tc are incubated 18-20 hours with tumor peptides or SAgs. DCs supernatants are harvested, centrifuged (at 4° C.) at 300 g for 20 mm and then at 10,000 g for 30 min (to eliminate cell debris). Exosomes are then pelleted at 100,000 g for one hour, and washed once in a large volume of PBS (over 100-fold the final volume of resuspension of the exosomes). The protein concentrations in exosome preparations is measured by Bradford assay (BioRad). The slightly acidic pH transiently induced by the acid peptide elution increases the amounts of exosomes produced by DCs. Three to five g of exosomes are routinely obtained from 5-10×10⁵ DCs in 18-20 hours. Exosomes containing LDL, oxyLDL, apolipoproteins, LDL receptors and oxyLDL receptors are obtained from normal hepatocytes by a method similar to that described above for dendritic cells and sickled erythrocytes as in Example 6.

[1557] Mice and Tumor Cell Lines for Exosome Trials

[1558] DBA/2J (H-2d) and BALB/c (H-2d) female mice 6-8 weeks of age are raised in pathogen-free conditions. P815 (H-2d) is a methylcholanthrene induced mastocytoma, syngeneic with DBA/2. TS/A (H-2d) is a spontaneously-arising undifferentiated mammary adenocarcinoma, syngeneic with BALB/c. All tumor cell lines are maintained in RPMI 1 640 supplemented with 10% endotoxin-free fetal calf serum (Gibco BRL), 2mM L-Glutamine, 100 U/ml penicillin, 100 mg/ml streptomycin, essential amino acids and pyruvate.

[1559] Experimental Mouse Models for Exosome Trials

[1560] Twice the minimal tumorigenic dose of tumor cells (5×10⁵ P815, 10⁵ TS/A) is inoculated intradermally in the upper right flank of DBA/2 and BALB/c mice, respectively. Animals with established tumors at days 3-4 for TS/A, or days 8-10 for P815, are immunized with a single intradermal injection of 3-5 g of exosomes per mouse in the lower ipsilateral flank. The tumor size is monitored biweekly and mice are sacrificed when bearing ulcerated or huge tumor burdens. All experiments are performed two to three times using individual treatment groups of five mice per group.

### EXAMPLE 37

### Bacterial Constructs for the Expression of SAgs Linked to Galactosylceramides, α-Gal Epitope. Peptidoglycans, Lipopolysaccharides and β1,3-Glucans

[1561] Nucleic acids encoding SAgs may be transfected into bacteria which naturally synthesize and express fundamental recognition units for innate immunity. Some of these moieties such as monogalactosylceramides and α-gal actosylceramides are potent immunogens and induce anti-tumor activity. The addition of the SAg and a dominant tumor associated epitope coexpressed with these natural bacterial constructs and administered to a tumor bearing host would promote a potent tumor specific response. The system described uses S. carnosus as a model bacterial system to express a SAg peptide and dominant tumor epitope.

[1562] Expression Vectors for Surface Display

[1563] The shuttle vector constructed pSPPmABPXM consists of the following parts: (i) the origin of replication for E. coli and the 13-lactamase gene giving ampicillin resistance for transformed E. coli cells; (ii) the origin of replication for phage f1; (iii) the origin of replication from S. aureus and the chloramphenicol acetyltransferase gene for staphylococcus expression; (iv) the promoter, signal sequence, and propeptide sequences from the S. hyicus lipase gene construct, optimized for expression in S. carnosus; (v) a multicloning site containing three unique recognition sites for restriction endonucleases; (vi) a gene fragment encoding a serum ABP from streptococcal protein G; and (vii) gene fragments encoding the cell wall-anchoring regions X and M from staphylococcal protein A.

[1564] As a model system, the surface display of SAg staphylococcal enterotoxin B. substitutes for place the 80 amino acid malaria peptide M3 from falciparum blood stage antigen Pf155/RESA. A plasmid vector, pSPPM3ABPXM is constructed, in which a gene fragment encoding SEB instead of M3 is introduced between the propeptide region and the ABP sequence of plasmid pSPPmABPXM. An oligonucleotide linker (5′AGCTTGGCTGTTCCGCCATGGCTCGAG-3′ with complementary sequence) is inserted into the HindIII site of plasmid pSZZmpISX thus creating additional NcoI and XhoI recognition sites downstream of the HindIII site in the resulting vector, pSZZmpI8XhoXM. A gene fragment encoding a 198-amino-acid ABP from the serum albumin binding region of streptococcal protein G is generated by a PCR

5′-CCGAATTCAAGCTTAGATGCTCTAGCAAAAGCCAAG-3′ and
5′-CCCCTGCAGTTAGGATCCCTCGAGAGGTAAAATTTCATC-3′

[1565] respectively) with plasmid pSPGI as template sequenced in plasmid pRIT28 by solid-phase DNA sequencing and HindIII-XhoI subcloned in frame downstream of the mp18 multilinker of pSZZmp18XhoXM. yielding plasmid pSZZmpI8ABPXM. An M3-encoding gene fragment was BamHI-HindIII subcloned from plasmid pRIT28EM3DAStop into pSZZmp18ABPXM, yielding plasmid pSZZM3ABPXM. Plasmid pLipPS17 is constructed from pLipPSlk the introduction of a BsmI recognition site in the beginning of the lipase signal sequence. a Bc/I site at the end of the signal sequence and a BgIII site at the end of the propeptide-encoding region by site-directed in vitro mutagenesis. A gene fragment constituting almost the entire S. carnosus vector pLipPSI except for a fragment encoding the C terminus of the propeptide and the majority of the mature lipase from S. hyicus is isolated by SalI-Hind III digestion and ligated to the E. Co/i plasmid pRIT28. which had previously been cut with the same restriction endonucleases. The resulting plasmid, designated pSDLip, contained the origin of replication for both E. coli and S. aureus. To restore the C-terminal region of the lipase propeptide, a gene fragment encoding the C-terminal part is generated by PCR amplification with the oligonucleotides

5′-CCGAATTCTCGAGGCTCCTAAAGAAAATAC-3′ and
5′-CCAAGCTTGGATCCTGCGCAGATCTTGGTGTTGGTTTTTTG-3′

[1566] as upstream and downstream primers. respectively, with plasmid pLipPS17 as template. This amplification introduced upstream EcoRI and XhoI sites and downstream FspI. BamHI. and HindIII recognition sequences by noncomplementary sequences in the PCR primers. The gene fragment encoding the C-terminal propeptide region was EcoRI-HindIII subcloned to pRIT28 to verify a correct sequence by solid-phase DNA sequencing and thereafter XhoI-BamHI transferred to SalI-BamHI-restricted pSDLip. The resulting plasmid. pSPP is HindIII restricted, filled in with Klenow polymerase. and religated to yield plasmid pSPPDHind, which encodes the signal peptide and the complete propeptide of the S. hyicus lipase with transcription from a promoter region suitable for overproduction in S. carnosus.

### EXAMPLE 38

### Gene Transfer for Expression of an Mono or Digalactosylceramide by Transfection with a Cosmid Genomic Library Prepared from a Cell Line in which the Specific Glycosylceramide is Highly Expressed

[1567] The deliberate transfer of mono or digalactosylceramide expression in tumor cells is achieved by transfection with a cosmid DNA library prepared from Fabry's cells in which the mono or digalactosylceramide is highly expressed. This model demonstrates a general method for transferring glycosyltransferase genes and other factors necessary for the expression of glycosphingolipid antigens. The recipient tumor cells contain mono or digalactosylceramide and the direct precursor, lactosylceramide. The transfected cells express mono or digalactosylceramide detected both chemically and immunologically and contained human DNA detected by an Alti sequence probe.

[1568] Cells and antibodies: Fabry's cells or normal cells with an α-gal actosidase deficiency and tumor cells including but not limited to neuroblastoma cells are used. Anti-galactosyl ceramide monoclonal antibody is prepared. Total DNA is prepared from Fabry's cells is excised by MboI and ligated by Bam HI-treated cosmid vector PCV 108, which has the SV40 promotor fused to the neomycin phosphotransferase gene. The target DNA for cosmid cloning is purified by gel electrophoresis between 30-40 KB size. In vitro packaging is made with an extract of lysogenic bacteria and propagated in E. coli. as described elsewhere.

[1569] Transfection and Selection of Galactosylceramide Expression: Cosmid library DNAs are transfected into various cells using the calcium phosphate DNA precipitation technique with the addition of a glycerol shock after a 6 hour incubation. Galactosylceramide selection is started 2 days later at 400 mg/ml concentration. The expression of galactosylceramide in the original Fabry's cell and the transfected tumor cells was determined by cytofluorometry (FACS II), in which FITC-conjugated anti-mono or digalactosylceramide antibody is used. Glycolipids in transfected cells are analyzed after cells were extracted in chloroform-methanol (2:1 and 1:1 v/v). The neutral glycolipid fraction is prepared by an acetylation procedure. The glycolipid profile is confirmed on HPTLC, followed by immunostaining with anti- mono or digalactosylceramide antibody.

### EXAMPLE 39

### Staphylococcal Collagen Binding Adhesin Nucleic Acids Transfected into SAg Transfected Tumor Cells, SAg Transfected DCs or Accessory Cells and S/D/t Cells

[1570] Collagen gene fragments from S. aureus strain FDA 574 are overexpressed in E. coli using the vector pQE-30 (QIAGEN inc. Chatworth, Calif.). Recombinant proteins expressed from this vector contain an NH2-terminal tail of six histidine residues. The gene named cna encoding a S. aureus collagen adhesin is isolated from a S. aureus genomic library cloned and sequenced. The cna gene encodes a 1185 amino acid polypeptide. The deduced amino acid sequence reveals several structural characteristics similar to previously described Gram-positive bacterial cell surface proteins.

[1571] Plasmids expressing cna gene fragments are produced as follows. Recombinant S. aureus collagen adhesin fragments are overexpressed in E. coli using three different prokaryotic expression systems. The amino terminus including the entire A domain is amplified from S. sureus FDA 574 chromosomal DNA using PCR together with primers CNA 20 and CNA 21. The amplified 1.6-kb cna gene fragment is cleaved with EcoRI and PstI, gel purified and ligated to the prokaryotic expression vector pKK223-3 obtained from Pharmacia LKB Biotechnology to create plasmid pKK1.5. Expression vector pKK223-3 contains an IPTG-inducible tac promoter adjacent to a consnesus Shine-Dalgarno ribosomal binding site. However, this vector lacks an initiation codon; therefore, the DNA to be expressed must contain an appropriate start codon. In order to express an internal cna fragment, a DNA linker sequence containing an ATG start codon is synthesized. Two partially complementary ologonucletides, JPI (5′AATTACCATGGAATTCCTGCA-3′) and JP2 (5′-TGGTACCTTAAGG-3′), are heated to 70° C. and slowly cooled to allow annealing. Once annealed, the double-stranded linker is phosphorylated by the addition of ATP and T4 polynucleotide kinase. The DNA linker contained EcoRI and PstI restriction sites at the 5′- and 3′-termini, respectively. These sites are used to insert the linker onto pKK223-3. A 2.9-kb EcoRI/PstI DNA fragment, originally isolated from lambdaGT11 clone pCOL1 1 was ligated to vector pKK223-3 to create plasmid pKK2.9. The collagen adhesin fragment encoded by pKK2.9 contains three repeated domains (B1, B2, and B3), the carboxyl terminus and downstream sequences.

[1572] The plamid containing the collagen adhesin is transfected into DTES by methods in Example 1 and 3 and expression of the transduced gene is monitored by Immunoblots (Example 33).

### EXAMPLE 40

### Transfection of Nucleic Acids Encoding SAgs in Combination with Nucleic Acids that Promote Apoptosis Induction or Predispose to Apoptosis

[1573] SAgs expressed in apoptotic tumor cells or tumor cell/DC hybrids are ingested by DCs which present them to the immune system in more which evokes a potent immune response to the tumor associated antigens. The apoptotic cell is also one which is overexpresses a GalCer such as one with a natural or acquired α-galactosidase deficiency or from a patient with Fabry's Disease. The apoptotic stimulus can be produced by concordant influenzal infection, radiation or chemotherapy. In addition, it may be inducible by an exogenous source such as TNF if the cell is predisposed by transfection of an potent inhibitor of NF-kB such as a modified form of IκBα. Additional stimuli to apoptosis are provided by numerous well established activators (caspase 9) or initiators (caspase 8) of the caspase system or the CD95 TNFR network. Having undergone apoptosis, the SAg transfected, GalCer overproducing cell is now ingested by DCs which are cross-primed to present the tumor antigens and the GalCer in the context of SAg stimulation resulting in a potent antitumor response. Methods and protocols for SAg transfection are given in Example 1 and for priming of DCs in Example 27-28 The apoptotic transfectants are used as a preventative or therapeutic antitumor vaccine by protocols in Example 15, 16, 18-23 and 29. They are also useful ex vivo to a population of tumor specific effector T cell or NKT cells for use in the adoptive immunotherapy of cancer (Examples 2-5, 7, 15, 16, 18-23, 29).

### EXAMPLE 41

### Preparation and Isolation of Glycosphingolipids and Verotoxins

[1574] Galabiosylceramide, Globotrioslceramides and Globotetraosylceramide

[1575] Globotrioslceramides (GB3) and globotetraosylceramide (Gb4) are purified from human renal tissue. Briefly, the chloroform/methanol tissue extract is first applied on a Bio-Sil A (Bio-Rad) silica column in chloroform. The column is extensively washed with chloroform, and neutral glycolipids are eluted with acetone/methanol,9:1 (vol/vol). The neutral glycolipid fraction is then applied on a second Bio-Sil A column in chloroform/methanol, 98:2 (vol/vol). Glycolipids are then resolved with a linear solvent gradient comprising equal weights of chloroform/methanol 15:1 (vol/vol), to chloroform/methanol, 4:1 (vol/vol). Galabiosylceramide (Gb2) or Gal(α1-4)Gal ceramide from marine sponge may be obtained, for example, from Dr T. Matsubara (Department of Chemistry, Kinki University, Kowakae. Japan).

[1576] VTs and Subunits: A simple method for purifying E. coli H30 verocytotoxin is as follows. The toxin, released from the cells by exposure to polymyxin B, is subjected to differential ammonium sulfate precipitation and sequential chromatography on hydroxylapatite, chromatofocussing, Cibachron blue, and Sephadex G-100 columns. The purified toxin, 39 kDa by gel filtration and having a pI of 6.72, resolves as a band which migrates at 32 kDa and another band of less than 14 kDa which migrates with the buffer front on reducing SDS-PAGE. The purified preparation is relatively heat-stable, and has a specific activity of 3×10⁹ CD50 units/mg protein in Vero sells, and LD50 values of 0.2, 9.0, and 40 g protein/kg in rabbits, rats, and mice, respectively. Antiserum to the toxin specifically neutralizes H 30 VT, Shiga toxin, and VT activity from some clinical isolates of VT+E. coli but not that from a porcine edema disease strain.

[1577] Verocytotoxin 2 (VT2) is purified from E. coli strain E32511 using, as starting material, cells harvested from a Penassay broth culture incubated for 6 h at 37° C. in the presence of mitomycin C (0.2 mg /ml). A crude extract of VT2, is obtained by polymyxin B treatment of cell pellets, is purified using differential ammonium sulphate precipitation, and sequential column chromatography. The purified toxin is estimated to have a pI of 6.5 by chromatofocusing and a molecular weight of 42 kDa by gel filtration; it has a specific activity of 1.39×10⁶ CD50 units/mg protein in Vero cells, and resolves as a major band of Mr 35 kDa and another band of <14 kDa which migrates with the buffer front on reducing SDS-PAGE. The purified toxin is not neutralized by VT1 antisera, and antisera prepared to this toxin in rabbits did not neutralize VT1, but completely neutralized the activity of the homologous toxin.

[1578] Recombinant Methods of Preparing VT's and Subunits: Recombinant VT1 is purified from pJLB28. VT2 from R82. and VT2c from E32511. The recombinant E. coli strain pJLB28 is used as a source of VT1 B subunit. High yields of the toxins or subunits (10-15 mg/3 liters, of broth culture) are purified by a method involving polymyxin B extraction, ultrafiltration, hydroxylapatite chromatography, chromatofocusing, and Cibacron Blue chromatography. VT2 is purified by virtually the same method from an E. coli clinical isolate, strain E32511. The cistron encoding the B subunit of E. coli Shiga-like toxin I (SLT-I) is cloned under control of the tac promoter in the expression vector pKK223-3 and the SLT-I B subunit is expressed constitutively in a wild -type background and inducibly in a lacI^{q} background. E. coli TB 1 lac pro rpsL ara thi f 80d LacZ D MI5 hsdR is obtained from Bethesda Research Laboratories (Gaithersburg, Md.). E. coli JMIO1 D lacc pro supE thi (F′ traD36 IacZ A MIS pro AB lacP) is obtained from Dr. J. D. Friesen (Department of Medical Genetics, University of Toronto, Toronto, Ontario, Canada). Plasmids pTZ18R and pKK223-3 are obtained from Pharmacia. Plasmid pJLB5 consists of a 3.0 kb KpnI fragment of bacteriophage H 19B DNA cloned in the KpnI site of pUC18. To construct plasmid pJLB34, pJLB5 is cut at the BgIII site and digested with nuclease Bal31. The ends are filled with Klenow fragment and dNTPs. The fragment remaining after deletion is cleaved with EcoRI, and the piece carrying the SLT-I B cistron is purified by agarose-gel electrophoresis. The fragment is recovered from the gel and cloned into pUC18 cut with EcoRI and HindII. The EcoRI-HindIII fragment is cloned in M13mp18 and its nucleotide sequence is determined. The B cistron coding sequence is recovered from pJLB34 as a 1.1 kb PstI fragment and was then cloned in the PstI fragment and was the cloned in the PstI site of the polylinker of pKK223-3. Clones with the correct orientation of insertion relative to the tac promoter are identified by restriction-endonuclease analysis. One plasmid with the orientation is selected and designated pJLB120. pJLB120 is transformed into E. coli TB1 for constitutive expression and into E. coli JM101 for inducible expression. Bacteria are grown in L-broth or brain heart infusion broth (Difco Laboratories, Detroit, Mich.) supplemented as necessary with carbenicillin at 50 mg/ml and IPTG (Bethesda Research Laboratories) at 1 mM.

[1579] Expression of Toxins: For E. coli JM 101 (pJLB 120), an overnight culture is used to inoculate fresh L-broth supplemented with carbenicillin (50 pg/ml) and was grown to mid-exponential phase (A600=0.3-0.6) at 37° C. with shaking at 300 rev./min. IPTG is added to a final concentration of 1 mM. and incubation is continued with aeration. For E. coli TB I (pJLB120), an overnight culture is used to inoculate fresh L-broth supplemented with carbenicillin (50 mg/ml), and this is grown for 12-18 h at 37° C., with shaking at 300 rev./min. In both cases the culture is harvested and the pellet is washed once with PBS (0.15M-NaCl/10 mM sodium phosphate buffer, pH 7.4) before extraction.

[1580] Polymxin B extraction of Toxins: The washed pellet is resuspended in PBS containing 0.1 mg/ml polymyxin B in one-quarter of the original culture volume and extracted as previously described. For purification, 18 h cultures of E. coli TBI (pJLB 120) are extracted with polymyxin B, and the extracts are concentrated 10-fold using a stirred-cell Amicon concentrator with a Ym-5 membrane (Amicon Corp., Danvers, Mass., USA).

[1581] Quantification of Toxins: Periplasmic extracts of VT-producing clones, prepared by polymyxin B extraction, are diluted as required and filtered onto nitrocellulose paper in a slot-blot apparatus (Bio-Rad Laboratories). VT is detected by using MAb 1 3C4 according to the Western-blot procedure described above. Blots are scanned with a Molecular Dynamics model 300A computing densitometer. VT is quantified by comparison with a standard curve generated with purified B subunit protein.

[1582] Purification of Toxins: The concentrated polymyxin B extract are dialysed overnight against 50 mM-Tris/HCl buffer, pH 7.4, and then applied to a DEAE-Sephacel column (1 cm×20 cm) equilibrated with 1 mM-Tris/HCL buffer, pH 7.4. Bound material is eluted by using a linear gradient of 0-1M-NaCl in 50 mM-Tris/HCl buffer, pH 7.4, and 5 ml fractions are collected. Fractions containing VT are identified, pooled and concentrated with Centriprep-3 concentrators (Amicon Corp.). This pool is dialyzed overnight against 25 mM-imidazole/HCl buffer, pH 7.4, and is applied to a column (1.5 cmx 2° Cm) of Polybuffer exchangcr 94 (Pharmacia) equilibrated with the same buffer. Elution is carried out with a degassed solution of Polybuffer 74 (Pharmacia) diluted 1:8 with distilled water and adjusted to pH 4.0 with HCl (11 column volumes). Fractions (5 ml) are collected, and the B subunit positive fractions are pooled and concentrated with Centriprep-3 (Amicon). Ampholytes are removed by Sephadex G-50 gel-filtration.

[1583] HPLC Purification of Toxins Approximately 1 mg (in 1 ml) of purified toxin or subunit is injected into a TSK-G2000SW HPLC gel filtration column previously equilibrated with 50 mM Tris-buffered saline (TBS), pH 7.4, flow rate of 1.0 ml/mm. Peaks, measured by absorbance at 1=280 nm, arecollected.

[1584] Toxin Subunit Separation: 1 mg of toxin subunit is concentrated to 30-50 ml using a Centricon 30 concentrator (Amicon). 1 ml of a subunit dissociating solution (6 M urea, 0.1 M NaCl, 0.1 M propionic acid, pH 4, is added dropwise, and the toxin is incubated without stirring at 4° C. for 1 h. The solution is then separated by HPLC gel filtration (as above) after previous column equilibration with the dissociating solution. Peaks, measured by absorbance at 1=280 nm, are collected.

### EXAMPLE 42

### Gangliosides Shed from Tumor Cells: Isolation from Tumor Cell Supernatants

[1585] Collection of Tumor Cell Supernatant

[1586] Tumor cells are cultured in 25 ml of no serum-low protein medium (NSLP) in an 8° Cm² flask for 1-5 days. Cells are harvested by centrifugation at 400 g for 10 mm, and the supernatant is concentrated 10-fold at 4° C. in an Amicon stirred cell with a 10-kDa cutoff ultrafilter. Concentrated supernatant and NSLP concentrated under the same conditions are stored at −20° C., and passed through a 0.1-um sterile membrane filter.

[1587] Metabolic Labeling of Gangliosides in Tumor Cell Supernatant

[1588] Tumor cells (10⁵/ml) are cultured in 10 ml of NSLP for 2 days. After three washes with fresh medium, cells are transferred into 10 ml of NSLP containing 1 mCi/ml D-[1-¹⁴C]GlcNH2-HCl (50 mCi/mmol (ICN Biomedicals, St. Laurent, Quebec, Canada) and 1 mCi/ml of D-[1-1⁴C]Gal (56 mCi/mmol; Amersham) to label gangliosides. After 24 hr, cells are washed with medium three times to remove unincorporated sugars, then cultured for an additional 24-48 hr in fresh medium, before harvesting by centrifugation at 400 g. Radioactivity in the tumor cell supernatant and cells is quantitated by liquid scintillation counting. The supernatant is clarified by centrifugation at 15,000g for 10 mm, then concentrated 10-fold using a Speedvac concentrator, before being analyzed by gel filtration chromatography.

[1589] Gel Filtration Chromatography of ¹⁴C-Labeled Tumor Cell Supernatant on Sepharose 2B-300

[1590] Concentrated ¹⁴C-labeled tumor cell supernatant is chromatographed on a Sepharose 2B-300 column (5 ml bed volume; Sigma Chemical Go, St Louis, Mo.), equilibrated with Tris-buffered saline (TBS; 50 mM Tris-HCl in 0.15 M NaCl, pH 7.4). The column is eluted at a flow rate of 0.2 ml/min at 22° C., and 200 ml fractions are collected and counted for ¹⁴C. Dipalmitoylphosphatidylcholine liposomes and sodium azide are used as standards to calibrate the void and included volume of the column, respectively.

[1591] Gel Filtration FPLC of ‘P-Labeled Tumor Cell Supernatant on Superose

[1592] FPLC is carried out on a Superose 6 column (1×30 cm; Pharmacia, Dorval, Quebec, Canada) linked to a Gilson HPLC system and a Gilson iliB ultraviolet flow detector. The column is calibrated with a series of standard proteins of known molecular mass, ranging from β-galactosidase (465 kDa) to β-lactoglobulin (36.8 kDa) (Pharmacia, High Molecular Weight Gel Filtration Calibration kit). The void volume and included volume are determined using Blue Dextran (2000 kDa) and sodium azide, respectively. ³H-Labeled bovine brain gangliosides and [¹⁴C]Gal dissolved in NSLP or TBS are also used as standards. Concentrated YAC-1 supernatant is eluted through the column at 22° C. with TBS at a flow rate of 0.5 ml/min. Fractions (0.5 ml) are collected and counted for ¹⁴C.

### EXAMPLE 43

### Assessment of SAg and VT Binding to Glycosphingolipids by TLC Overlay

[1593] Glycolipids (dissolved in chloroform/methanol (2:1 v/v), are applied to a TLC plate and separated in choroform/methanol/water (65:25:4, v/v). Toxin binding is determined using known methods. Briefly, after separation of the glycolipids, the plate is air dried, incubated overnight at 37° C. in a solution of 1% (m/v) gelatin in 50 mM Tris/HCL, 150 mM NaCI, pH 7.4 (buffer A). The plate is washed in buffer A and incubated successively with VT 1 (0.07 mg/ml in buffer A) followed by monoclonal antibody PHI (1.5 mg/ml in buffer A), and finally with goat antimouse IgG horseradish peroxidase conjugate (diluted 1:2000 in buffer A). Toxin binding is visualized using 4-chloro-1-naphthol. An equivalent plate is run and treated with 3% (m/v) orcinol spray in 3 M H₂SO₄ to visualize carbohydrate and ensure equal concentrations.

[1594] Alternate Microtitre Plate Binding Assay

[1595] Quantification of toxin binding to various glycoconjugates is performed using published methods. A methanolic solution [100 pl containing glycolipid (300 nmol). phosphatidylcholine (0.5 mg) and cholesterol (0.25 mg)] is added to microplate wells and the methanol is allowed to evaporate overnight at room temperature. The wells are blocked with 2% (m/v) BSA in buffer A (200 ml/well) for 2 h at room temperature and subsequently washed once with buffer A containing 0.1% BSA (BSA/buffer A). 100 ml aliquots of dilutions of [¹²⁵I]-VT-1 in BSA/buffer A are added to the wells and incubated for 2 h at room temperature. The wells are washed five times with BSA/buffer A, excised and the radioactivity is measured in a g counter. Scatchard analysis was performed using the LIGAND program.

### EXAMPLE 44

### Methods of Induction and Assessment of Apoptosis & Inhibition of Protein Synthesis

[1596] Tumor cells (5×10⁵cells/ml) are cultivated at 37° C. in 96-well round-bottomed microtiter plates (Becton Dickinson) in 200 ml leucine-depleted RPMI (Eurobio, France) containing 1 mCi of [³ H] leucine. with or without 10 ng/ml VT. After 18 hrs. cells are harvested on class fiber filters, and radioactivity incorporated in proteins measured in a scintillation counter.

[1597] Ultrastructural Analysis of VT-Treated Astrocytoma Cells

[1598] Cells are cultivated on a transferable 9 mm cylcopore membrane (0.45 mm pore size. Falcon) to form a confluent monolayer and are incubated at 37° C. with VTI (10 ng/ml). Cells are fixed at room temperature by addition of 1.6% glutaraldehyde to the wells and then incubated in 0.066 M Sorensen buffer (pH 7.4) containing 1.5% glutaraldehyde for 1h at 4° C. After 2 h of washing with 0.1 phosphate buffer, cells are post-fixed in 2% osmium tetroxide in the same buffer. After dehydration in graded ethanols and propylene oxide, Epon embedding, thin sectioning and uranyl-lead counterstaining on grids are performed. Thin sections are examined in a Philips EM 400 electron microscope and ultrastructural features of apoptosis are analyzed

[1599] Flow cytometry: Apoptosis of astrocytoma cells, incubated with 10 ng/ml of VT1 for 24-36 hrs in-the presence of 10% bovine fetal serum is analyzed on an Epics Profile Analyzer (Coulter Electronics. Pathology. University of Toronto) according to known procedures. After treatment, cells are trypsinized and the 200×g centrifuged cell pellet is suspended in.1 ml of hypotonic fluorochrome solution of 50 mg/ml propidium iodide (Sigma) and stained for 30 min at 4° C. To remove RNA prior to staining. cells are treated with 100 ml of 200 mg/ml solution of DNase-free RNase A at 37° C. for 30 min. Cell cycle distribution is determined using manual gating. Flow cytrometric quantitation of apoptotic cells within the propidium iodide-stained population is performed as described. Debris and dead cells are excluded on the basis of their forward and side light-scattering properties. Astrocytoma cells grown simultaneously in the absence of VT1 serve as controls.

[1600] DNA Fragmentation Assays Cells: Tumor cells are incubated in RPMI 1640 medium alone or in the presence of intact VT or VT-B. After 18-h culture, cells are counted and viability assessed by trypan blue exclusion. Cells are then centrifuged and washed twice with saline buffer. The pellets are lysed by incubation for 1 h at 50° C. in 10 mM EDTA, 200 mM NaCl, 0.1 mg/ml proteinase K, 0.5% (w/v) SDS, and 50 Mm Tris-HCL, pH 8. The DNA is extracted with phenol, chloroform:isoamylalcohol (24:1), and then ethanol precipitated. Unfragmented DNA is discarded, and 0.1 volume of 3 M sodium acetate, pH 7.2, is added to the supenatant which is left at −80° C. overnight. The precipitate containing fragmented DNA is centrifuged (1300 g, 30 mm) and dried under vacuum. DNA derived from 5×10⁶ cells is then resuspended in 20 ml RNAse buffer containing 0.5 mg/ml DNAse-free RNAse (Sigma), 15 mM NaCl, and 10 mM Tris-HCL, pH 7.5. and incubated at 50° C. for 1 h; Electrophoresis is carried out at 70V in 2% agarose gel containing 0.1 mg/ml ethidium bromide in a buffer containing 2 mM EDTA, 80 mM Tris-phosphate. pH 8. After electrophoresis. gels are examined under UV. Phage DNA from bacteriophage 1 and f digested by HindIII and HaeII, respectively, provide molecular weight standards.

[1601] Nuclear staining with propidium iodide: SF-539 cells grown on the cover slips overnight are incubated at 37° C. with VT-12B subunit (50 mg/ml) for 1.5 hrs or 10 hrs and fixed (with 1% paraformaldehyde for 3 minutes). permeabilized with 0.1% Triton X in 100 mM PBS for 5 min, and stained with 5 mg/ml propidium iodide (Sigma). After extensive wash with 50 mM PBS, the fixed cells are mounted with DABCO (1,4-diazabicyclo-octane (Sigma), and nuclear staining is observed under incident UV illumination.

[1602] Proliferation assay: Approximately 1-5×10⁴ cells are added to 24-well plates and incubated in a-MEM in 5% CO2 at 37° C. After 24 hr, the growth medium is replaced with medium containing various concentrations of the holotoxin VT1 (0.0.1.5.50, 100 ng/ml). The treated astrocytoma cell lines and endothelial cells are trypsinized and counted at intervals throughout the growth curve. Cell viability is assessed by trypan blue dye exclusion. Cell counts are plotted against time for the various concentrations of VT1 and B subunit. For each time point analyzed, the wells are set-up in triplicate.

[1603] For selected cell lines, the B subunit of VT1, VT2, and VT2c is added alone to the astrocytoma cells at same concentrations listed above. A single dose of VT1. VT2. and VT2c is added to confluent astrocytoma cells in microplate wells. Cell survival at 72 hr is monitored by staining with 0.1 % crystal violet, and measuring the optical density at 590 nm using a Dynatek microtiter plate reader.

### EXAMPLE 45

### Multidrug Resistant Cells: Culture and Preparation

[1604] MCF-7-wt and MCF-7-AdR (adriamycin-resistant) cells are obtained from Drs. K. H. Cowan and M. B. Goldsmith, National Cancer Institute. Cells are maintained in RPMI 1640 medium containing 10% FBS (v/v), 50 units/ml penicillin, 50 mg/ml streptomycin, and 584 mg/liter L-glutamine. KB-3-1 human oral epidermoid carcinoma cells (parent, drug-sensitive) and KB-V-1 cells (highly MDR) and subclones are obtained from the National Cancer Institute). Cells are grown in high glucose (4.5 g/liter) Dulbecco's modified Eagle's medium containing 10% FBS and other components described above. The KB-V-1 cell line is maintained with vinblastine (1.0 mg/ml) in the medium. NIH:OVCAR-3 cells (human ovarian adenocarcinoma, drug-resistant) are obtained from the American Type Culture Collection and grown in RPMI 1640 medium containing insulin (10 mg/ml), 10% PBS, and other components listed above. All cells are cultured in a humidified, 6.5% CO2 atmosphere, tissue culture incubator. Cells are subcultured once a week using 0.05% trypsin and 0.53 mM EDTA solution.

[1605] Lipid Mass Analysis: Cell lipids are analyzed by TLC separation and charring of the chromatogram. Briefly, total cellular lipids are extracted and equal aliquots (by weight) from each sample are spotted on TLC plates. Plates are developed in the desired solvent system (see below), air-dried for 1 h, and sprayed using a 35% solution of sulfuric acid in water (v/v). The lipids are charred by heating in an oven at 180° C. for 30 mm, and resulting black bands are visualized.

[1606] Cell Radiolabeling and Analysis of Sphingolipids: MCF-7 cells grown in medium containing 10% FBS, are switched to serum-free medium containing 0.1% fatty acid-free BSA. Cell lipids are radiolabeled by incubating cells with [³H]serine (2.0 mCi/ml), [³H]palmitic acid (1.0 mCi/ml, or [³H]galactose 1.0 mCi/ml) for the indicated times. In some instances, cells are radiolabeled in medium containing 5% PBS. Cells are then rinsed twice with PBS, and 2 ml of ice-cold methanol containing 2% acetic acid is added. The cells are scraped free, transferred to glass test tubes (13×100 mm), and lipids are extracted by the addition of chloroform (2 ml) followed by water (2 ml). The resulting organic lower phase is evaporated under a stream of nitrogen. Lipids are resuspended in 100 ml of chloroform methanol (1:1, v/v) and aliquots are applied to TLC plates. When using [³H]galactose, radiolabeled cells are washed twice with PBS, transferred to glass tubes with methanol (2 ml, and glucosylceramides and gangliosides (2.5 mg of each) are added to aid recovery. Lipids are extracted by the addition of water (2 ml; and 2 ml of chloroform (three times consecutively). The pooled organic lower phase is treated as above. Lipid analysis is carried out by various TLC separations using solvent system I, chloroform/methanol/ammonium hydroxide (65:25:5, v/v); solvent system II, chloroform/methanol/ammonium hydroxide (40:10:1, v/v), solvent system III, chloroform/methanol/water (60:40:8, v/v), or solvent system IV, chloroform/methanol/acetic acid/water (50:30:7:4, v/v). For determination of ceramides. an aliquot of the chloroform-soluble lipids is base-hydrolyzed in 0.1 N KOH in methanol for 1 h at 37° C.; lipids are re-extracted and separated using solvent system V hexane/diethyl ether/formic acid (60:40:1, v/v). Galactosyl- and glucosyl-ceramides are separated using solvent system VI, chloroform/methanol/water (60:25:4, v/v). This separation is performed on TLC plates that are pre-run in 2.5% borax in methanol/water (1: 1) and heated at 110° C. prior to use.

[1607] Radiochromatograms are sprayed with EN³HANCE and exposed for 3-7 days for autoradiography. TLC areas, aligned with hands on the autoradiographs or with iodine-stained commercial lipid standards are scraped from the plate. Water (0.5 ml) is added to the plate scrapings, followed by 4.5 ml of EcoLume counting fluid, and the samples are quantitated by liquid scintillation spectrometry.

[1608] Purification of Glycosylceramides: The compounds, extracted with total lipids from MCF-7-AdrR cells, are resolved from other lipids on preparative TLC using silica gel H plates developed in solvent system II. The appropriate region of the TLC plate is then scraped into test tubes, and lipids are extracted with chloroform/methanol/acetic acid/water (50:25:1:2, v/v). The samples are centrifuged, and the solvent transferred to new glass tubes and evaporated to dryness under nitrogen.

[1609] Fast-Atom Bombardment/Mass Spectrometry of TLC-isolated Lipid-: FAB/MS spectra are acquired using a VG 70 SEQ tandem hybrid instrument of EBqQ geometry (VG analytical, Altrincham, UK.). The instrument is equipped with a standard unheated VG FAB ion source and a standard saddle-field gun (Ion Tech Ltd., Middlesex, UK) that produces a beam of xenon atoms at 8 kV and 1 mA. The mass spectrometer is adjusted to a resolving power of 1000, and spectra are obtained at 8 kV using a scan speed of 10 s/decade. 2-Hydroxyethyl disulfide is used as matrix in the positive FAB/MS, and triethanolamine is used as a matrix in the negative FAB/MS. Negative FAB and positive FAB give different values for the same compounds, due to charge (proton content) differences.

### EXAMPLE 46

### Incubation of Tumor Cells with Hydroxy Fatty Acids for Selective Synthesis of Galactosphingolipids and Lipid Analysis

[1610] Tumor cells on filters are incubated for 1 hr at 37° C. in the presence of labeled and unlabelled [³H]Cer(C6[D-20H]). After the incubation, lipids are extracted from the cells and the combined incubation media and analyzed Lipids are extracted from cells and media by a two-phase extraction. The upper phase contains 20 mM acetic acid and (for radiolabeled lipids) 120 mM KCl. After a chloroform wash. which is added to the lower phase, lipids remaining in the upper phase GalCer are collected on SepPak C18 cartridges (Waters, Milford, Mass.) from which lipids are eluted with chloroform/methanol/water 1:22:0.1) and methanol. The organic (lower) phase is dried under N₂, and the lipids are applied to TLC plates that were dipped in 2.5% boric acid in methanol, dried, and activated by heating at 110° C. for 30 mm. They are developed in two dimensions:

[1611] I. chloroform/methanol/25%NH4OH/water (65:35:4:4. v/v); and

[1612] II. chloroforrm/acetone/methanol, acetic acid/water (50:20:10:10:5. v/v).

[1613] Fluorescent spots are detected under UV scraped from the TLC plates and the fluorescent lipid analogs are extracted from the silica in 2 ml chloroform/methanol/20 mM acetic acid (1:2:2:1 v/v) for 30 mm. After pelleting the silica for 10 min at 1,500 rpm fluorescence in the supernatants is quantified in a fluorimeter (Kontron. Zorich, Switzerland). Radiolabeled spots are detected by fluorography after dipping the TLC plates in 0.4% PPO in 2-methylnaphthalene with 10% xylene. Preflashed film (Kodak X-Omat S) is exposed to the TLC plates for 3 d at −80° C. The radioactive spots are scraped from the plates, and the radioactivity is quantified by liquid scintillation counting in 0.3 ml Solulyte (J. T. Baker ChemicaL. Deventer, The Netherlands) and 3 ml of Ultinsa Gold (Packard Instruments. Downers Grove. Ill.).

### EXAMPLE 47

### Conjugation of Proteins to Lipoproteins

[1614] The preferred method for coupling superantigens to lipoproteins is to use 10 mM solution of sodium periodate for oxidation of the carbohydrate in the lipoprotein. This will also cleave c-c bonds in the sugars with adjacent hydroxyls and oxidize them to reactive aldehydes. Superantigens form Schiff base linkages with the aldehyde modified sugar groups under alkaline conditions. the aldehyde modified sugar is then coupled to the amine containing superantigen peptide or polypeptide. The oxidation is followed by reductive amination using sodium cyanoborohydride to reduce the labile Schiff base between the aldehyde on the carbohydrate and the amine on the superantigen to form stable secondary amine covalent linkages.

[1615] An alternative procedure is to periodate oxidize the lipoprotein as above to create reactive aldehyde groups. Heterobifunctional cross-linking agent such as 4-(4-N-Maleimidophenyl)butryric acid hydrazide (MPBH) 4-(4-N-Maleimidophenyl)buryric acid hydrazide (MPBH), and 4-(N-Maleimidomethyl)cyclohexane-1-carboxyl-hydrazide (M2C2H) which contain a carbonyl-reactive hydrazide group on one end and a sulfhydryl-reactive maleimide on the other are preferred. The hydrazide reacts specifically with aldehyde functional groups to create a hydrazone linkage a type of Schiff base. To stabilize the bond between the hydrazide and aldehyde, the hydrazone is reacted with sodium cyanoborohydride to reduce the double bond and form a secure covalent linkage. The cross-bridge between the two functional ends provides a long, 17.9-A spacer. These agents couple to periodate-oxidized aldehydes on the lipoportein carbohydrate via the hydrazine and to sulfhydryl groups on the superantigen via sulthydryl reactive maleimide group. Superantigens without reactive sulfhydryl groups are first thiolated with SATA or Trout's reagent before addition to the reactive maleide. A sulthydryl-containing protein or molecule is is bound via the maleimide end of MPBH and the derivative purified by gel filtration to remove excess reactants, and then mixed with a lipoprotein (that had been previously oxidized to provide aldehyde residues) to effect the final conjugation.

[1616] The opposite approach e.g., modification of the glycoprotein first, purification, and subsequent mixing with a sulfhydryl-containing molecule is also acceptable. With this second option, however, the purification step should be done quickly to prevent extensive hydrolysis of the maleimide group. (See Hermanson GT Bioconjugate Techniques Academic Press, San Diego Calif., 1996).

[1617] Protocol for periodate oxidation

[1618] 1. Periodate-oxidize a liposome suspension containing glycolipid components according to Section 2. Adjust the concentration of total lipid to about 5 mg/ml.

[1619] 2. Dissolve the protein to be coupled in 20 mM sodium borate, 0.15 M NaCl, pH 8.4, at a concentration of at least 10 mg/ml.

[1620] 3. Add 0.5 ml of protein solution to each milliliter of lipoprotein suspension with stirring.

[1621] 4. Incubate for 2 h at room temperature to form Schiff base interactions between the aldehydes on the lipoprotein and the amines on the protein molecules.

[1622] 5. In a fume hood, dissolve 125 mg of sodium cyanoborohydride in I ml water (makes a 2 M solution). This solution may be allowed to sit for 30 mm to eliminate most of the hydrogen-bubble evolution that could affect the lipoprotein suspension.

[1623] 6. Add 10 μl of the cyanoborohydride solution to each milliliter of the lipoprotein reaction.

[1624] 7. React overnight at 4° C.

[1625] 8. Remove unconjugated protein and excess cyanoborohydride by gel filtration using a column of Sephadex G-50 or G-75.

### EXAMPLE 48

### Isolation of Lipoproteins

[1626] Human LDL is isolated by sequential ultracentrifugation (d 1.019-1.063 g/ml) from freshly drawn, citrated normolipidemic human plasma to which EDTA 0.1 mmol/liter is added. Freshly obtained plasma is subjected to differential ultracentrifugation to isolate the desired lipoprotein fractions Typically, the following density fractions were isolated: 1) d<1.02. to remove VLDL and IDL; 2) d=1.02-1.05, to obtain LDL; 3) d=1.05-1.08, to obtain Lp(a); and 4) d=1.08-1.21, to obtain Lp(a) and HDL. The Lp(a)-containing density fractions were subjected to gel filtration chromatography on a Bio-Gel A-15 m column (2.5×90 cm). This column was eluted with 1.0 M NaCl, 10 mM Tris, 10 mM NaN3, 1 mM EDTA, pH 7.4, and was continuously monitored at 280 nm. The LDL- and HDL-containing density fractions are also subjected to gel filtration chromatography to remove any contaminating species and for uniformity of sample preparation. They are further dialyzed against 0.01 M sodium phosphate pH 7.4, containing 0.15 M sodium chloride and 0.01% EDTA, sterilized on 0.2-um Millipore membrane, and stored at 4° C. under nitrogen (up to 3 weeks).

[1627] Lipoprotein (a) (Lp(a)): Lp(a) is prepared from fresh human plasma by flotation centrifugation followed by affinity chromatography on lysine-Sepharose and CsCI density gradient centrifugation as described. Lipoprotein preparations are dialyzed against 0.15 M sodium chloride containing 0.01% EDTA at 0.01% sodium azide, filter sterilized (0.45 pm) and stored at 4° C. in vials filled to allow no air space. No contamination of the preparations by plasminogen is detected by either Coomassie Blue staining of sodium dodecyl sulfate (SDS) gels or by treatment with streptokinase and measuring plasmin activity with a chromogenic substrate. S2251. The sensitivities of these assays excluded plasminogen contamination of >1% and >0.4% respectively. Lp (a)-free LDL, HDL and acetylated LDL are prepared as previously described. The LDL contained no apoA-1 and the HDL contained no detectable apoB-100. The apoprotein composition is verified by SDS polyacrylamide gel elecrophoresis.

[1628] Lysine-Sepharose Chromatography: Lipoprotein (a) has an affinity for lysine-Sepharose by virtue of lysine binding kringle 4 domain(s) located on apo(a). The most important domain appears to be kringle 437, which has the greatest homology to kringle 4 of plasminogen, although there may be other kringles with lesser affinity for lysine which also contribute to the interaction of Lp(a) with lysine-Sepharose. Plasminogen and Lp(a) have similar affinities for lysineSepharose; however, Lp(a) species with different apo(a) isoforms may have affinities that are significantly greater or weaker than that of plasminogen. The buffer of choice in the isolation of plasminogen from plasma by lysine-Sepharose affinity chromatography has been 0.1 M phosphate buffer, pH 7.4. When the same buffer system is used in the chromatography of Lp(a), not all the lipoprotein is found to bind to the lysine-Sepharose i.e., approximately 80% of Lp(a) contained in the plasma had the capacity to interact with lysine-Sepharose. The percentage of Lp(a) binding to lysine-Sepharose is increased by lowering the ionic strength of the buffer medium. Lipoprotein (a) species with large apo(a) isoforms tend to self-associate in the cold therefore it is best to perform the chromatographic isolation at room temperature.

[1629] Preparation of Lysine-Sepharose 4B: Packed Sepharose 4B (250 ml) is washed with 8 liters of water on a coarse sintered glass funnel and activated with 25 g CNBr dissolved in 50 ml acetonitrile. The reaction is carried out in a well-ventilated hood, on ice, and the pH is maintained with 6 N NaOH at pH 11. After approximately 15 to 30 mm, the activated Sepharose 4B is washed with 8 liters of 0.1 M NaHCO₃ pH 8.1. The agarose is then packed by filtration, diluted with 250 ml of 0.1 M NaHCO₃ pH 8.1, containing 50 g lysine, and stirred gently overnight at 4°. The freshly conjugated lysine-Sepharose is then washed with 6 to 10 liters of 1 mM HCl followed by 8 liters of 0.1 M NaHCO3, pH 8.1, and an aliquot is saved for determination of the concentration of immobilized lysine residues using the method of Wilkie and Landry. The concentration of coupled lysine varies from 15 to 25 umol per milliliter packed gel.

[1630] Chromatography: Bio-Rad (Richmond, Calif.) Econo-Pac columns (1×12 cm) are packed with 5 ml lysine-Sepharose which is preequilibrated with column buffer (e.g., 0.1 M phosphate, 0.01% NaN₂, pH 7.4). A porous polymer filter is placed on top of the lysine-Sepharose gel bed to prevent the column from running dry. Plasma samples smaller than 3 ml are applied to the column and allowed to run through by gravity at room temperature. Larger volumes (up to 50 ml) should be applied with a pump or by gravity, but at flow rates that should not exceed 20 ml/cm²/hr. The samples are washed into the column with four 0.5-ml aliquots of column buffer to be followed with four 0.5 ml aliquots, before Lp(a) is eluted withe 0.2<EACA in 10 mM phosphate, pH 7.4. One milliliter aliquots are applied at a time, and 1 ml fractions are collected in separate tubes. Liprotein(a)and plasminogen-containing fractions (tubes 4 through 10) are located by their absorbance at 280 nm. The volume of applied plasma depends on the Lp(a) content and on the sensitivity of the absorbance monitor that is part of the density gradient fractionating system.

[1631] Density Gradient Centrifugation of Lp(a): Place 5 ml of 20% (w/w) NaBr into a SW-40 ultracentrifuge tube (ultraclear). Carefully layer the eluate from the lysine-Sepharose column (up to 8 ml) on top of the NaBr solution and, if necessary, top off the tube with 0.2 M EACA, 10 mM phosphate, pH 7.4. Place the tubes in the bucket of the swinging-bucket rotor and centrifuge 64 hr at 39,000 rpm and 20°. After centrifugation is completed, the tubes are carefully removed from the buckets and placed in the density gradient fractionating system. The tubes are pierced at the bottom, and the gradient is pushed out the top at a flow rate of 1 ml/min with a dense fluorocarbon oil, Fluorinert FC-40 (ISCO), that has a density of 1.85 g/ml. The chart speed is 1 cm/min, and the fraction collector is set to 0.5 ml/tube. The gradient is monitored at 280 nm, and the sensitivity of the chart recorder is adjusted according to the Lp(a) content of the eluate. Densities of the various fractions are measured with a density meter by established techniques.

[1632] Isolation of Apolipoproteins B-48 and B-100: The following density gradient ultracentrifugation procedure for isolating subfractions of triglyceride-rich lipoproteins is suitable for SDS-PAGE on both slab and rod gels. Plasma is recovered by low speed centrifugation (1750 g, 20 min, 10). To minimize proteolytic degradation of apo B, 1.0 μl/ml plasma phenylmethylsulfonyl fluoride (PMSF, Sigma, St. Louis, Mo.), 10 mM dissolved in 2-propanol, and 5 μl/ml plasma aprotinin (Trasylol, Bayer, Leverkusen, (Germany), 1400 μg/liter, are added. Subsequently 140.4 mg solid NaCl is added per 1.0 ml plasma to increase the density to 1.10 kg/liter. Normally, atotal volume of 4.0 ml of the d 1.10 kg/liter plasma is put in the bottom of a 13.4-ml polyallomer ultracentrifuge tube (Ultra-Clear, Beckman Instruments, Palo Alto, Calif.). Alternatively, 3.0 ml plasma can be mixed with 1.5 ml) 1.42 kg/liter NaUr, from which 4.0 ml is transferred to the ultracentrifuge tube. For the rod gel method, two such tubes are required to obtain enough material from each sample. For the slab gel method, 1.0 ml plasma is sufficient. In the latter case, a 1.0 ml portion of 1.10 kg/liter plasma can be mixed with 3.0 ml of 1.10 kg/liter NaCl in the tube. A density gradient consisting of 3.0 ml each of 1.065, 1.020, and 1.006 kg/liter NaCl solutions is then sequentially layered on top of the plasma.

[1633] Ultracentrifugation is performed in a SW40 Ti swinging bucket rotor (Beckman) at 40,000 rpm and 15° (Beckman L8-55 ultracentrifuge). Consecutive runs calculated to float Svedberg flotation rate (Sf)>400 (32 min), SI 60-400 (3 hr 28 mm), and Sf20-60 (14-16 After each centrifugation, the top 0.5 ml of the gradient containing the respective lipoprotein subclasses is aspirated, and 0.5 ml of density 1.006 kg/liter salt solution is used to refill the tube before the next run. The Sf1 12-20 fraction is recovered after the last ultracentrifugal run by slicing the tube 29 mm from the top after the Sf 20-60 lipoproteins have been aspirated. All salt solutions should be adjusted to pH 7.4 and contain 0.02 % (w/v) NaN3 and 0.01% Na2EDTA. This method yields lipoprotein preparations almost completely devoid of plasma albumin.

### EXAMPLE 49

### Preparation & Isolation of Oxidized LDL (oxyLDL

[1634] Oxidized LDL (oxyLDL): Native LDL (200 μg protein/ml) is oxidized by exposure to 5 uM CuSO4 for 24 h at 25° C. and the degree of oxidation is assessed by the increase of mobility on 1% agarose gel (1.3-1.5 versus native LDL) and the formation of thiobarbituric acid-reactive substances (3.41±0.8 mmol/L). Oxidation is terminated by refrigeration. Different preparations of oxyLDL display similar electrophoretic mobilities. For comparison, commercially available preparations of native and copper-oxidized LDLs (Sigma Chemical Co., St. Louis, Mo. and Biomedical Technologies, Inc. Stoughton, Mass., respectively) are used. The level of LDL oxidation is evaluated by monitoring the formation of lipid hydroperoxides, using the FOX-2 procedure and thiobarbituric acid-reactive substances (TBARS)). The relative electrophoretic mobility is evaluated on Hydragel (Sebia, Paris, France) and the level of trinitrobenzenesulfonic acid-reactive amino groups was determined

[1635] The formation of thiobarbituric acid-reactive substances is 17.8 nanomoles of malondialdehyde/mg protein using an oxyLDL preparation with relative electrophoretic mobility of 1.4.

[1636] Methods for Measurement of Low-Density Lipoprotein Oxidation

[1637] Oxidation of LDL in vitro is accompanied by characteristic changes of chemical, physicochemical, and biological properties, and a variety of methods may therefore be used for determining the extent and/or rate of oxidation of LDL. They include measurement of the increase of thiobarbituric acid-reactive substances (TBARS), total lipid hydroperoxides defined lipid hydroperoxides, hydroxy and hydroperoxy fatty acids, conjugated dienes, oxysterols, lysophosphatides, aldehydes and fluorescent chromophores as well as measurements of the disappearance of endogenous antioxidants and polyunsaturated fatty acids, and oxygen uptake. The apolipoprotein B (apoB) becomes progressively altered during oxidation; its loss of reactive amino groups and fragmentation to smaller peptides is determined and used as an index of oxidative modification. The net increase of the negative surface charge of the whole LDL particle is analyzed as relative electrophoretic mobility (REM) by agarose gel electrophoresis. The biological assays used most frequently for assessment of the extent of oxidative modification are the rate of uptake of LDL by cultured macrophages and its cytotoxicity toward cultured cells. Immunological assays such as enzyme-linked immunosorbent assay (ELISA) and radioimmunoassay (RIA) employing polyclonal or monoclonal antibodies recognizing certain modifications in apoB characteristic for oxidative modification are employed. The epitopes produced by covalent binding of malonaldehyde or 4-hydroxynonenal are of particular interest. Nuclear magnetic resonance (NMR), electron spin resonance (ESR), circular dichrorism (CD), and fluorescence polarization have also been applied to study certain aspects of LDL oxidation. Simple methods, such as the measure of TBARS, conjugated dienes, or fluorescence are preferred. Most characterize oxidized LDL by at least two independent measurements, for example, TBARS or REM and macrophage uptake, antioxidants and conjugated dienes.

[1638] From kinetic experiments one can conclude that both cell-mediated oxidation of LDL and oxidation in the absence of cells catalyzed by Cu²⁺ ions proceed in three consecutive time phases: lag phase, propagation phase, and decomposition phase. I)during the lag phase the LDL becomes depleted of antioxidants, and during this period only minimal lipid peroxidation occurs in LDL, as shown by measuring polyunsaturated fatty acids (PUFAs), TBARS, lipid hydroperoxides, fluorescence, and conjugated dienes. When LDL is depleted of its antioxidants, the rate of lipid peroxidation rapidly accelerates and a lipid peroxide maximum is reached after about 70-80% of the LDL, PUFAs are oxidized. Thereafter, the peroxide content of LDL, starts to decrease again because of decomposition reactions. During the lag and propagation phases the time profile for TBARS, fluorescence at 430 nm, lipid peroxides, dienes, and REM are very similar and only after the peroxide maximum do the different indices separate and follow different kinetics. This also indicates that all the methods will give equivalent results for the susceptibility of LDL to oxidation as measured by the duration of the lag time.

[1639] Preparation of Low-Density Lipoproteins for Oxidation Isolation of Low Density Lipoproteins

[1640] After overnight fasting blood samples are withdrawn by venipuncture and collected by free flow of blood into plastic tubes containing the appropriate volume of an aqueous solution of 10% EDTA (w/v) (disodium salt, pH 7.4) to obtain a final blood concentration of 0. 1% EDTA (wlv). EDTA serves as anticoagulant and antioxidant. Blood is centrifuged at 1000 g for 10 mm; the supernatant is then centrifuged at 10° C. and 1000 g for 5 min, followed by centrifugation at 15,000 g for 10 min. This procedure removes all cellular debris, and a completely clear plasma is obtained. Generally plasma is not stored but is used the same day for LDL. isolation. The most common method for isolation of LDL is a two-step sequential ultracentrifugation with a total run duration of about 48 hr. LDL is prepared for oxidation experiments by a single 20-hr run with a discontinuous density gradient. Plasma (up to 4 ml) adjusted with solid KBr to a density of 1.22 g/liter is layered on the bottom of a centrifuge tube (Beckman polyallomer tubes, total volume 13.2 ml) and then overlaid by KBr density solutions of 1.08 (3 ml), 1.05 (3 ml), and 1.00 g/liter (to fill the tube) containing 1 g/liter EDTA (pH 7.4). All density solutions are purged with nitrogen before use. The tubes are centrifuged in a Beckman SW 41 Ti rotor at 40,000 rpm at 100 for 20 hr. After centrifugation the main lipoproteins very low-density lipoproteins (VLDL), LDL, and high-density lipoproteins (HDL) are well separated from each other, and the LDL band characterized by the yellow color due to the endogenous β-carotene, is collected by aspiration with a syringe and transferred into a polycarbonate tube.

[1641] Next, the cholesterol content of the isolated LDL sample is determined with the CHOD-PAP enzymatic test kit (Boehringer, Mannheim, Germany). When 4 ml normolipidemic plasma is centrifuged, the final LDL stock solution harvested from the ultracentrifugation has a concentration of total cholesterol of about 1.6 to 2.2 mg/ml. Based on the known composition of LDL the total cholesterol values can be converted to LDL mass per milliliter (multiply cholesterol by the factor 3.16) or LDL protein per milliliter (multiply total cholesterol by the factor 0.63). It is also possible to determine the LDL concentration by protein measurement. Next EDTA is from the LDL stock solution and the oxidation is conducted immediately after isolation of LDL. For storage the LDL stock solution is sterile filtered through a 0.3 um filter adapted to a syringe into a sterile, evacuated glass vial and subsequently purged with nitrogen (Techne Vial, Mallinckrodt-Diagnostica, Holland, or Behring, Marburg, Germany).

[1642] Removal of EDTA: Removal of EDTA and salt from the density gradient from the LDL stock solution is conducted with prepacked columns (Econo-Pac 10DG, Bio-Rad, Richmond, Calif.) filled with Bio-Gel P6 as desalting gel. The bed volume is 10 ml with a void volume of 3.3 ml, and the total column volume is 30 ml. The gel is preconditioned by passing 20 ml phosphate-buffered saline (PBS, 10 ml sodium phosphate buffer, pH 7.4, containing 0.15 M sodium chloride) through the column.

[1643] A volume of 0.5 ml of the LDL stock solution is then applied to the column. After the LDL solution has run into the gel, 2.5 ml PBS is applied. The first 3 ml of eluate are discharged. The column is then eluted with 1 ml PBS, and 1 ml EDTA-free LDL solution is collected in a 1.5-ml Eppendorf vial. The vial is immediately made oxygen-free by nitrogen gassing and transferred to a refrigerator. An aliquot is removed to determine again the concentration by the CHOD-PAP method. The LDL solution can be rather unstable at this stage, depending on the donor, and therefore the time elapsed between desalting and the final oxidation experiment should not exceed 60 mm.

[1644] Thiobarbituric Acid-Reactive Substances as Index of Low-Density Lipoprotein Oxidation: The preferred assay in LDL oxidation studies, both in presence and absence of cells, is the determination of thiobarbituric acid (TBA)-reactive substances (TBARS) by one of the TBA assays developed for lipid peroxidation studies. The basal value of TBARS in freshly prepared LDL samples is usually low (0.5 to 3 nm/mg LDL protein) or undetectable. In LDL oxidized for about 24 hr with cells or CU²⁺ ions, the TBARS are in the range of 30 to 100 nmol/mg protein. In copper-stimulated oxidation, formation of TBARS shows a lag phase of about 40-150 min depending on the LDL, temperature, medium, and Cu2+ concentration; during this lag phase TBARS do not increase. Thereafter, TBARS rapidly increase for about 1-2 hr to a plateau value. On prolonged incubation TBARS remain more or less constant or increase slightly. The reported time course studies for TBARS in cell-mediated oxidation suggest that oxidation proceeds similarly to Cu²⁺ oxidation, with a lag phase followed by a rapid increase to a plateau level. In this context, it should be noted that most researchers only determine TBARS as an end point after about 24 hr incubation, when LDL has reached a final stage of oxidation.

[1645] Assays used for measurement of TBARS: Specifically, 100 ul of an LDL preparation (50 μg LDL cholesterin or 150 μg protein) is added to 1 ml of 20% trichloroacetic acid (TCA). Following precipitation, 1 ml of 1% thiobarbituric acid (TBA) is added, and the mixture is heated 45 min at 95°, cooled on ice, and centrifuged (20 min at 1000 g). TBARS are then determined by measuring the absorbance at 532 nm or the emission fluorescence at 553 nm (excitation 515 nm). Calibration is done with a malonaldehyde standard prepared from tetramethoxypropane.

[1646] The second assay is typically as follows: LDL (25 μg protein) is mixed with 1.5 ml of 20% TCA and 1.5 ml of 0.67% TBA. After heating at 1000 for 30 mm, TBARS are determined fluorimetrically at an emission wavelength of 553 nm with excitation at 515 nm. The sensitlvity was reported to be 0.1 nmol TBARS/assay. This is equivalent to 4 nmol TBARS/mg protein. Haberland a al. determined the malonaldehyde-LDL adduct using a TBA assay. The malondialdehyde (MDA-treated LDL was precipitated with heparin-manganese, the supernatant was discharged after centrifugation, and the precipitate was washed with heparin-manganese prior to the TBA test.

[1647] Minimally modified LDL (MM-LDL) is prepared by dialyzing native LDL against 9 uM FeSO₄ in PBS for 72 h at 4° C. The electrophoretic mobility increased 1.1 to 1.2 versus native LDL. Mildly oxidized LDL was also obtained by (UV+copper/EDTA)-mediated oxidation under mild conditions: LDL solution (2 mg of apo/B/ml containing 2 umol/liter CuSO4) was irradiated for 2 h. as a thin film (5 mm) in an open beaker placed 10 cm under the UV-C source (HNS 30W OFR Osram UV-C tube, 1ₘₐₓ 254 nm, 0.5 milliwatt/cm² determined using a Scientech thermopile Model 360001), under the standard conditions. At the end of the irradiation, aliquots were taken up for analyses and oxidized LDL (200 μg of apoB/ml under standard conditions or at the indicated concentration) were immediately incorporated in the culture medium.

[1648] Acetylation of LDL is performed with excess acetic anhydride. Endotoxin contamination in oxyLDL is measured with the coagulation Limulas amebocyte lysate assay using a commercially available kit (E-TOXATE, Sigma Chemical Co.).

[1649] Induction of Apoptosis by oxyLDL: Incubation of HUVEC with oxLDL for 18 hours induced DNA fragmentation in a concentration-dependent manner with maximal effects at 10 μg/mL. In contrast, native LDL did not induce apoptosis in the concentration range tested. The induction of apoptosis by oxyLDL is confirmed by demonstrating DNA fragmentation through agarose gel electrophoresis. LDH release did not increase ³10 μg/mL oxLDL (105±11% compared with control cells) excluding the induction of necrosis.

[1650] Detection of Fas and FasL Expression on Endothelial Cells: 90% confluent HAECs and HUVECs were incubated with oxyLDL (150 g protein/ml) or L-a-palmitoyl lysophosphatidyleholine (LPC, 45 uM, Sigma Chemical Co.) at 37° C., 5% CO2 for 13 h, and detached from the culture plate with 0.5% EDTA. To determine FasL expression, endothelial cells are incubated with an anti-FasL antibody (C-20, Santa Cruz Biotechnology, Santa Cruz, Calif.) or with rabbit IgG followed by a FITC-conjugated antibody against rabbit Ig (Biosource, Camarillo, Calif.). To determine Fas expression, endothelial cells were incubated with an FITC-conjugated anti-Fas monoclonal antibody (clone UBZ. Immunotech. Wemtbrook. Me,) or an FITC.conjugated mouse IgG. Immunofluorescence staining was analyzed by FACS (fluorescence-activated cell sorter) (Becton Dickinson. Mountain View, Calif.).

[1651] Detection of DNA fragmentation by agarose gel electrophoresis: IIUVECs (10⁶) were incubated in the presence or absence of native LDL (300 μg protein/ml). oxyLDL (300 μg protein/ml). LPS (100 endotoxin U/ml), or a neutralizing anti-FasL antibody (i0 μg/ml, 4H9,MBL, Nagoya. Japan) for 36 h. Attached cells and floating cells were combined and lysed in 0.33 ml of lysis buffer (10 mM Tris-HCl. pH 8.0, 1 mM EDTA, 0.2% Triton X-100) followed by incubation with 0.1 mg/ml RNAase A for 1 h at 37° C. and 0.2 mg/mi proteinase K for 3 h at 50° C. Ethanol-precipitated DNA was resuspende in TE buffer, fractionated on 1.5% agarose gel in 1×TBE buffer, and stained with ethidium bromide.

[1652] Detection of DNA fragmentation by TdT-mediated dUTP nick-end labeling (TUNEL): 70% confluent HUVECs are incubated in the presence or absence of OxLDL (300 μg protein/ml), a neutralizing anti-FasL antibody (10 μg/m 4H9). or an agonistic anti-Fas antibody (0.5 μg/ml CH11, MBL) for 16 h at 37° C., 5% CO₂. Attached cells harvested by trypsinization and floating cells are combined, fixed in 4% paraformaidehyde, permeabilized in 0.1% Triton X-100, 0.1% sodium citrate, and incubated with TUNEL solution (Boehringer Mannheim. Indianapolis. Ind.) in the absence or in the presence of terminal deoxynucleotidyl transferase. After washing in PBS, fluorescence intensity was analyzed by FACS.

[1653] Cell viability assay: HAECs or HUVECs are cultured in a 96-well plate at 80% confluency and incubated in the presence or absence of oxyLDL (300 μg protein/ml), LPC-C 16:0 (55 uM). a neutralizing anti-FasL antibody (10 μg/ml. 4H9). or an agonistic anti-Fas antibody (0.5 μg/ml. CH11) for 18 h. Cell viability is measured by means of MTT (dimethyithiazol-diphenyltetrazolium bromide) assay and percentage of cell death was calculated as 100×(1−viability of treated endothelial cells/viability of untreated endothelial cells).

[1654] Cell Viability Assay and Reagents-Human umbilical vein endothelial cells (HUVECs) are isolated and cultured in endotheial growth medium (SCM; Clonetics, San Diego, Calif.). HUVECs cultured in a 96-well plate at 80% confluency are incubated with oyxLDL or LPC at indicated doses for 16 h. Cell viability is measured by means of MTT (3-(4,5-dimethyl thiazol-2-yl)-2,5-diphenyl tetrazolium bromide) assay.

### EXAMPLE 50

### Preparation of Vesicles Expressing Recombinant Membrane Bound Superantigens Using the Yeast sec6 Mutant

[1655] The superantigen cDNA, or oxyLDL receptor, apoprotein verotoxin or other polypeptide given herein corresponding to the cDNA for protein expression in yeast is used. The length of the 5′-untranslated region is minimized. Expression of a cDNA in the sec6-4 yeast mutant is best controlled and may be maximized with an inducible promoter. The GAL1 promoter is preferred. The pYES2 expression vector (InVitrogen, San Diego, Calif.) contains the GALI promoter followed by a multiple cloning site. Other commonly used inducible promoters include the metallothionein CUPI promoter, which is tightly controlled by copper; promoters activated in response to heat shock, which are of particular interest for expression in the temperature-sensitive sec6-4 mutant and the PH05 promoter, which is derepressed at low phosphate concentrations. Introduction of the plasmid into yeast cells is accomplished either by electroporation or LiCi-mediated transformation. Isolation of transformants requires selection yeast that are ura3 auxotrophs are able to grow on media lacking uracil when they contain the pYES2 expression vector that contains the wild-type URA3 gene. Other selectable markers include enzymes in the adenine, histidine, leucine, lysine, and tryptophan biosynthetic pathways. The superantigen cDNAs are cloned into the pYES2 expression vector and selected for transformants on plates with synthetic complete (SC) medium lacking uracil but containing 2% raffinose as the carbon source (SC-Ura raff medium). Single colonies are isolated and grown overnight to saturation in 2 ml of SC-Ura raff medium at 250 with constant shaking in 2% raffinose instead of glucose. In a subsequent step the yeast are switched to medium containing galactose as the carbon source as the GAL1 promoter initiates gene expression only when galactose is the predominant carbon source. The 2-ml starter culture in SC-Ura raff medium is added to a 1-liter culture of the same growth medium and incubated at 25° with constant shaking. When these cultures reach an OD600 (optical density at a wavelength of 600 nm) of about 1.0 (usually about 12 hr), the cultures are centrifuged at 4000 g at 4° for 5 min, resuspended in 4 liters of SC-Ura gal induction medium (containing 2% galactose instead of 2% raffinose as the carbon source), and shifted to 37° for 2-3 hr to induce protein expression in the sec6 vesicles.

[1656] Following growth at 37°, the cells are collected by centrifugation at 4000 g at 40 for 5 mm and washed once in ice-cold water. Pellets are resuspended in an absolute minimum volume of water and quick frozen in liquid nitrogen. Cultures may then be stored indefinitely at −70°. Thawed cultures are resuspended to a final concentration of 50 OD618˜units/ml (e.g., a 1 -liter culture at 0D600 =1.0 is resuspended in 20 ml) in 10 mM dithiothreitol (DTF) and 100 mM Tris-CI, pH 9.4. The resuspended culture is shaken gently at room temperature for 10 min. This step increases the efficiency of spheroplast lysis at a later step by reducing disulfide bonds in the yeast cell wall. We then collect the cells by centrifugation at 4000 g at 40 for 5 mm and resuspend them in spheroplast buffer to a final concentration of 50 OD600 units/ml. Spheroplast buffer consists of 1.4 M sorbitol, 50 mM K2HPO4, pH 7.5, 10 mM NaN3, and 40 mM 2-mercaptoethanol. Spheroplasts are generated by digesting the cell wall with lyticase (or zymolyase) for 45 min at 37°, The amount of bacterially expressed, recombinant lyticase needed to form spheroplasts is determined empirically; after 45 min the OD₆₀₀ of a 10-ul aliquot of the yeast suspension diluted into 1 ml of 0.1% sodium dodecyl sulfate (SDS) should be ˜20% of the OD₆₀₀of the initial dilution measured at 0 min. The spheroplasts are then harvested at 3000 g for 5 min at 4°, and the cells are resuspended gently with a pipette or Teflon rod in spheroplast buffer containing 10 mM MnCl₂ to a final concentration of 50 OD₆₀₀ units/ml. Concanavalin A (Sigma, St. Louis, Mo.) is then added to a final concentration of 0.78 to 1.25 mg/ml and incubated with rotation or gentle shaking at 40 for 15-30 mm. A concanavalin A stock solution (25 mg/ml) is prepared in spheroplast buffer containing 1 mM MnCl2 and 1 mM CaCl₂ and is frozen in 1-mi aliquots. Lectin-coated spheroplasts are harvested at 3000 g for 5 mm at 40 and then resuspended in lysis buffer to a final concentration of 60-70 0D₆₀₀ units/mi. The suspension is homogenized using the loose pestle of a Dounce homogenizer and 30-40 strokes of the pestle at 40 (or on ice). Lysis bufferconsists of 0.8 M sorbitol, 10 mM triethanolamine (TEA), and 1 mM EDTA. The pH is adjusted to 7.2 with acetic acid or TEA.

[1657] Unlysed cells, cell debris, mitochondria, and nuclei are pelleted at 20,000 g for 10 min at 4° C. The supernatant is removed with a pipette and centrifuged at 144,000 g for 1 hr at 40 to pellet the secretory vesicles. The supernatant is decanted carefully and the pellet is resuspended in either lysis buffer or another buffer containing osmotic support.

### EXAMPLE 51

### Use of Antisense Oligonucleotides to Inactivate ITIMS In Vitro and In Vivo

[1658] Antisense agents inhibit specific gene expression by exploiting hybridization of complementary nucleic acids, resulting in decreased mRNA stability, or through blocking mRNA processing, transport or translation. An RNA or single stranded DNA molecule that is complementary to the mRNA of ITIM is introduced into cells in vitro. The antisense molecule forms base-pairs with the mRNA, thus blocks some essential step in translation.

[1659] Antisense oligonucleotides can be delivered by plasmids or as small single-stranded oligonucleotides. Modifications of these strategies, include inducible antisense vectors, antisense retroviral vectors, and a variety of oligonucleotide modifications to facilitate delivery and enhance efficacy are known in the art.

[1660] Expression vectors are constructed to produce high levels of antisense RNA in transfected cells. Antisense nucleic acids can be introduced into cells of the immune system using synthetic single-stranded DNA oligonucleotides. When short oligonucleotides are complementary to the sequence around the translational initiation site (the AUG codon) of mRNA in the cells, they hybridize to the mRNA and prevent initiation of translation. Chemically modifying the oligonucleotides can greatly increase the efficiency with which they enter cells and their stability once inside.

[1661] Principle of the Method: Genetically engineered plasmid-based antisense methods, expression vectors which generate RNAs containing sequences complementary to key regions of specific genes are used. These antisense expression vectors include prokaryotic or eukaryotic selectable markers that allow identification of transfectants, a promoter that controls the expression of the antisense RNA, an antisense sequence which is complementary to a bindable region in the target gene sequence (5′ untranslated region and/or translation initiation regions preferred); and a stabilizing sequences to assure stability of the antisense RNA product.

[1662] Optimal gene replacement protocols include both inhibition of the endogenous gene and overexpression of a selected gene. Oligonucleotide-based antisense methods use synthetic single-stranded oligonucleotides which may range from simple deoxyribonucleotides to more complex molecules containing base modifications and/or covalent modifications which enhance delivery, uptake or antisense effect.

[1663] Materials and Reagents: Antisense expression vectors are obtained from the laboratories where they were developed or are constructed by combining the key elements described above. These include neomycin as a selectable marker so transfectants can be isolated employing Dulbecco's modified Eagle's medium with ¹⁰% calf serum and the appropriate concentration of the antibiotic G418 (Bethesda Research Laboratories. Bethesda, Md.). G418 permits selection of stable transformants.

[1664] Pure oligonucleotide preparations and nuclease-free culture conditions are utilized. Antisense oligonucleotides are synthesized by solid state methods and purified by chromatography or gel purification (or obtained from commercial sources). Following purification, the oligonucleotides are lyophilized two to five times in sterile distilled water to remove volatile components. Both unmodified and modified oligonucleotides are suspended in 10 mM HEPES (N-2-hydroxyethylpiperazine-N′-2-ethanesulfonic acid)-buffered saline at pH 7.4. The pH of these oligonucleotide solutions is checked to avoid the toxicity of nonphysiologic pH. Nuclease-free culture conditions are employed.

[1665] Design and Construction of Antisense Expression Vectors: For inhibition of ITIM expression in mammalian cells, a prototype antisense expression vector is used that allows cloning of antisense and control “sense” gene fragments between the metal-inducible metallothionein promoter and β-globin sequences which are added to provide stability to the antisense sequences. We have also constructed vectors which differ only in the promoter region because this region is readily excised by 5′EcoRI and 3′ HindIII sites. One series of vectors is regulated by the steroid-inducible mouse mammary tumor virus (MMTV) promoter. and another series of vectors is regulated by the constitutive Rous sarcoma virus LTR. Antisense retroviral vectors are constructed which are compatible with the plasmid expression vectors: the promoter cartridge is flanked by unique 5′ XhoI and 3′ HindIII sites, and the antisense cartridge is flanked by unique 5′ HindIII and 3′ BamHI sites. Because the target sequence for the 84-bp antisense vector resides entirely within the 5′-untranslated region, this antisense vector inhibits the endogenous ITIM gene.

[1666] Antisense-resistant expression vectors are constructed by cloning the HaeII-EcoRI fragment of human ITIM cDNA into a Moloney LTR-regulated expression vector removing sequences complementary to the 84-bp antisense ITIM construct. In order to demonstrate which domains of the ITIM gene contribute to cellular inhibition, ITIM C-terminal deletion mutants are constructed by linker insertion of an in-frame termination codon. All of these mutant ITIM plasmids are subcloned into expression vectors for expression in cultured fibroblasts (Moloney-LTR promoter) or F9 embryonal carcinoma cells (Rous sarcoma virus LTR promoter).

[1667] Production of Stable Transformants Expressing Antisense RNAi: Stable transformants expressing both the antisense-resistant vector and the anti-ITIM RNA construct are obtained by cotransfection of both plasmids using the following protocol which generally results in 20-50 transformants per 20-50 mm² tissue culture dish.

[1668] Day 1. 1.2 million cultured mouse fibroblasts (NIH 3T3, BALBc/3T3) are plated per 100-mm² tissue culture plates in 10 ml of Dulbecco's minimal Eagle's medium supplemented with 10% calf serum and allowed cells to attach overnight.

[1669] Day 2. Each plate is transfected by calcium-DNA coprecipitation with 20 mg of cesium-banded plasmid DNA. For cotransfection studies, use 2 mg of the antisense vector containing the Neo selectable marker and 18 mg of the antisense-resistant expression vector which lacks this selectable marker. This results in expression of both plasmids in most stable transformants. A DNA-calcium solution is prepared by mixing in the following order: 20 mg of plasmid DNA dissolved in TE (10 mM Tris, pH 7.5. 1 mM EDTA), 50 ml of 2.5 M CaCl₂ and TE to make 500 ml total. This solution is added slowly to 500 ml of 40 mM HEPES-buffered saline (pH 7.2) and is then mixed by bubble aeration to form an opalescent solution. After a 30-mm incubation at 25°, the entire: 1-ml coprecipitate is added to the plate. After incubating the DNA coprecipitate with the cells for 4 hr. the media is aspirated, and the cells are treated with 5% glycerol in 20 mM HEPES buffer for 3 min. After this glycerol shock, the cells are washed again with phosphate-buffered saline (PBS) and then refed with 10 ml of fresh medium containing serum.

[1670] Day 3. The media is aspirated and replaced with 10 ml of Dulbecco's minimal Eagle's medium supplemented with 10% calfserum and 1 mg/ml of the antibiotic G418.

[1671] Day 5. The medium is aspirated (which by this time contains dead cells and cellular debris from G418-sensitive cells) and refed with 10 ml of Dulbecco's minimal Eagle's medium supplemented with 10% calf serum and 1 mg/ml of the antibiotic G418.

[1672] Day 7. The medium is aspirated and refed with 10 ml of Dulbecco's minimal Eagle's medium supplemented with 10% calf serum and 1 mg/ml of the antibiotic G418.

[1673] Days 9-12. Once individual clones are clearly apparent they can be isolated with cloning rings and expanded in individual wells of microtiter plates. Multiple clones should be studied for each combination of antisense vector and antisense-resistant rescue plasmid.

[1674] Cotransfectant clones are analyzed to quantitate the extent of antisense inhibition of the ITIM gene, the level of expression of the antisense-resistant transfected gene, and the effect of target gene inhibition on cellular reactivity to lipid antigens or SAgs presented alone or in the context of cell bound or soluble MHC or CD1 molecules.

[1675] Assays to quantitate reactivity and analyze antisense inhibition in the presence and absence of antisense RNA are carried out as follows: [³H]Thymidine incorporation of stable transfectants and controls is measured after exposure to lipid antigens or SAgs in the context of MHC or CD1 either cell bound (or immobilized) or in soluble form. Control “sense” plasmids are similarly treated and tested. In addition, rescue with a wild-type antisense-resistant gene should overcome the antisense inhibition, provide additional assurance that the growth inhibition is actually due to specific inhibition of the ITIM gene.

[1676] Antisense inhibition is quantitated by measuring levels of either target gene m RNA or protein. Nuclease protection assays provide an excellent method for quantitation of antisense effect. Cells from the stable transformant clones are placed in DMEM with 0.5% calf serum for 48 hr prior to steroid treatment and/or serum restimulation. RNA is isolated from cells by the guanidinium thiocyanate method and the total RNA from 2×10⁶ cells is hybridized with 3×10⁶ cpm of the labeled RNA probe for 16 hr at 45°. Samples are then treated with 2 mg/ml of RNase A and 4 U/ml of RNase Ti for 30 min at 25° and are deproteinized by sequential treatment with proteinase K and phenol-chloroform followed; by ethanol precipitation. and electrophoresis on an 8% denaturing polyacrylamide gel.

[1677] Antisense Inhibition with Anti-ITIM Oligonucleotides: Oligonucleotides target regions of the ITIM mRNA or SLAP RNA which are available for hybridization i.e., a region that is unbound by protein and free of secondary structure. Sequences within the 5′-untranslated region or translation initiation region are employed for design of antisense oligonucleotides. The length of oligonucleotides employed for antisense inhibition varies between 12 and 20 nucleotides. A melting temperature™ of 50-55° is optimal for specific inhibition of target genes. Tm for short oligonucleotides is best determined by a formula in which G and C residues equal 40 and A and T residues equal 20. Optimal ITIM antisense oligonucleotides range from 14 to 19 nucleotides.

[1678] Determination of Oligonucleotide Stability: Oligonucleotides are 5′ end labeled with polynucleotide kinase and [³²P]ATP and are then added to culture media and serum (plus unlabeled oligonucleotide to achieve a final oligonucleotide concentration of 5 mM: for a 15-mer this is approximately 20 mg/ml). Aliquots are removed periodically and resolved on denaturing 20% acrylamide gels.

[1679] Detection of Intracellular Duplexes: To detect intracellular duplex, 20 mg of oligonucleotide is 5′ end labeled oligonucleotides with 20 mCi of [³²P]ATP to achieve a specific activity of 50 million cpm/mg. After incubation for 4 hr. unincorporated oligonucleotides are removed by washing the cells three times with HEPES-buffered saline prewarmed to 37° (to prevent the melting of duplexes). The cells are then lysed in 100 ml of Nonidet P-40 lysis buffer (10 mM Tris, pH 7.5. 10 mM NaCl. 3 mM MgCl2, 0.05% Nonidet P-4t)) containing 0.5% sodium dodecyl sulfate, 100 mg of proteinase K per ml. and a 10,000-fold excess of unlabeled oligomer (as the carrier). Following phenol/chloroform extraction and ethanol precipitation. a S1 nuclease protection assay is performed at 37° and the products are analyzed on a 20% denaturing acrylamide gel (containing 42 g of urea of 100 ml). To demonstrate that the duplex is intracellular and not an artifact of RNA isolation, an “add-back” control is performed in which the measured amount of cell-associated radioactivity is added with carrier (excess unlabeled oligonucleotide) to a lysate of cells that were previously unexposed to oligonucleotide.

[1680] To confirm that antisense oligonucleotide effects are due entirely to target gene inhibition, and not merely toxicity due to unexpected effects of double-stranded RNA, reversal experiments are performed employing an excess of anticomplementary (“sense”) oligonucleotide. If an effect is due to hybridization of antisense oligonucleotide sequences to specific gene target sequences, then addition of an excess of sense oligonucleotide reverses the observed effects on cell growth or gene expression but expression of the antisense rescue gene restores the ITIM function. This provides a useful specificity control for the antisense RNA and suggests that the observed results are due to inhibition of endogenous gene expression.

[1681] Oligonucleotide preparations can have toxic effects on cells, thus anti-sense oligonucleotide these experiments employ multiple controls to assure that the observed results are not merely due to toxicity. First, the target gene is shown to be inhibited by analyzing levels of mRNA and/or protein. Secondly, the demonstration that oligonucleotides with sufficient sequence dyshomology are able to prohibit duplex formation. and third that the addition of an anticomplementary oligonucleotide can reverse the antisense oligonucleotide effects by hybridization competition.

### EXAMPLE 52

### ITIM and SLAP Gene Knockout Mice

[1682] Gene Targeting and Generation of Mutant Mice

[1683] Nucleic acids encoding the ITIM of the IR_{TAA}, IR_{IDA} and IR_{SAg} and SLAP are deleted in vitro using homologous recombination and insertional mutagenesis. With this approach, mice are produced that have mutations in any gene for which one has a cDNA or genomic clone. Stable cultured lines of totipotent cells, such as from mouse embryos or ES (ES) cell lines, grown and manipulated in tissue culture are introduced into blastocyst-stage mouse embryos and can participate in the development of all tissues of the embryo, including the germ line. ES cells genetically altered in culture (e.g., whether by addition or mutation of genes) are used to produce strains or lines of mice that carry and transmit this genetic alteration. Cells which have undergone homologous recombination are rendered positively selectable by introduction of a marker gene that can be inserted into any cloned DNA molecule. Negatively selectable markers are introduced at one end of the transfecting DNA molecule to allow selection against random insertions in parallel with the selection for the positively selectable marker. With these and other technical advances it is now feasible to mutate a cloned ITIM gene by site-specific mutagenesis in ES cells and thereby generate a an inbred mouse line with the desired mutation and functional deficiency.

[1684] Gene Targeting Vectors

[1685] Homologous recombination frequency is higher when the gene targeting vector is isogenic with the ES cells and also increases markedly with increasing sequence homology. With this in mind, genomic clones are isolated that contain 3-5 kb of sequence homology on each side of the intended ITIM or SLAP mutation (except for the case wherein PCR is used to screen for homologous recombination).

[1686] To make an ITIM or SLAP knockout or null mutation, a deletion is made in the ITIM gene, followed by insertion of a positive selectable marker. Insertion alone is more likely to allow some expression of the gene by aberrant transcription and/or translation. The ITIM or SLAP mutation is made near the 5′ end of the gene and includes deletion of some of the sequence encoding, the mature protein. An effective strategy is to delete the ATG start codon and the signal sequence if they fall in a single exon. If the transcription start site is known, this is also deleted. Such deletion of control elements for transcription, translation and secretion increases the probabilitty that expression of the desired protein will be completely ablated. The positive selectable marker is then inserted in place of the deleted segment.

[1687] The positive selectable marker is one that confers antibiotic resistance (to G418, hygromycin B or an equivalent antibiotic) by replacing the bacterial control sequences of the neomycin resistance (neo) or hygromycin resistance (hyg) genes, respectively, with eukaryotic control sequences. Both markers are expressed at many loci in ES cells when controlled by the mouse phosphoglycerate kinase (PGK) promoter and polyadenylation signal. The engineered pMCI promoter of the gene encoding hypoxanthine-guanine phosphoribosyltransferase (HGPRT) is also used successfully in ES cells for gene targeting.

[1688] To promote targeted versus random integration of the targeting vector, a positive/negative selection procedure is used which utilizes a negative selectable marker at one or both ends of the targeting vector. The negative marker is lost during homologous recombination but retained during random integration. The negative selectable marker utilized is the herpes simplex virus thymidine kinase gene (HSV-TK), which renders cells sensitive to ganciclovir. HSV-TK works well under control of either the pMCI or the PGK promoter. The same promoters are used for both positive and negative selectable markers. To minimize random breaks between them, the distance between shoulld be is less than about 5 kb. The targeting vector has a unique restriction site that permits linearization before transfer of the DNA into cells. Several vectors which have eight-cutter sites (e.g., the NotI restriction site) in their polylinkers are used for these constructs. Screening for targeted cells is by genomic Southern blotting using a probe that is outside the targeting vector or by by PCR.

[1689] Specific Methodology: The methods disclosed herein are all conventional in the art and are described, for example, in George E L et al., Methods in Enzymol.245: 386-420. (1994) which are hereby incorporated by reference in their entirety.

[1690] ES Cells: The ES cell lines: CC1.2, CCE, D32 ABI, and JI are useful and are tested for germ line transmission by implanting into blastocysts of a mouse strain having a different coat color genotype. ES cell lines are derived from the 129/Sv mouse strain which carries the wild type agouti gene (brown color). Injection of these ES cells into C57BL/6 (strain with black coat color) blastocysts produces chimeric offpsring with a mix of black and agouti coat color. When the ES cells contribute to the-germ line, agouti progeny are born (because agouti is dominant to black).

[1691] ES cells are are maintained in culture on mouse embryonic fibroblast (MEF) feeder cells and/or in the presence of a growth factor—leukemia inhibitory factor (LIF)—and are used at low passage numbers to maintain totipotency and avoid differentiation. The MEF feeders are prepared from embryos of an appropriate transgenic mouse strain that carries genes for resistance to the positive selection drug (e.g., G418/neomycin, hygromycin).

[1692] Reagents for ES Cell Culture: ES cell medium is a supplemented Dulbecco's modified Eagle's medium (DMEM) to which has been added L-glutamine, and sodium pyruvate and HEPES buffer; the pH is maintainedd at 7.5. For use, the medium is supplemented with the following additives: fresh glutamine, fetal bovine serum (FBS, final concentration, 15% v/v), nonessential amino acids, 2-mercaptoethanol and LIF (final concentration, 1000 U/ml) of LIF. All these components are commercially available, e.g., from GIBCO-BRL (Life Technologies, Inc.) Feeder cell medium is the above DMEM-based medium without the additives, but supplemented with FBS (10% v/v). Phosphate-buffered saline (PBS): 0.8% NaCl, 0.02% KCl, 0.02% KH₂PO₄, 0.115% NaHPO₄ (all w/v) at pH 7.4. Ethylenediaminetetraacetic acid (EDTA) is at a final concentratin of 0.2 g/liter in PBS, pH 7.2. Trypsin-EDTA: 40 ml of EDTA, with a 2.5% (w/v) concenttation of trypsin. HEPES-buffered saline (HBS): HBS: 25 mM HEPES, 134 mM NaCl, 5 mM KCl, 0.7 mM Na₂PO₄, pH 7.1.

[1693] Preparation of MEF Feeder Layers; Preparation of Primary MEF: For G418-resistant feeders, a transgenic mouse line containing the neo gene is used. Similarly, if hygromycin is used for selection, feeder cells have the hyg gene.

[1694] 1. Fibroblasts are obtained by aseptically removing embryos from a 14-day pregnant mouse into PBS. One embryo at a time is dissected to removve fetal membranes, placenta, the head and soft tissue. Each embryo is placed in a separate petri dish and minced with two scalpels or fine curved scissors. Trypsin-EDTA (fresh, 2 ml) is added to each dish and incubated at 37° C. for 5 min. Then, the reaction is stopped by addition of 8 ml of feeder cell medium to each dish, and and the contents are transferred to a conical centrifuge tube and allowed to settle for 2 min.

[1695] 2. The cell-containing supernatant of each tube is poured into one 10-cm diameter culture dish. Fresh medium is added 24 hr, and the cultures are maintained in a standard tissue culture incubator for about 1-2 days until the cells are confluent.

[1696] 3. The cells of each dish are then split into ten dishes each (10 cm) and again cultured until confluent (about 2 days).

[1697] 4. The cells or each dish are trypsinized and resuspended in 1 ml of ice-cold freezing medium (feeder cell medium, but with 20% (vlv) FBS andd 10% (vlv) dimethyl sulfoxide (DMSO). Aliquots of 1 ml per vial are frozen and stored at −80° for 24 hr. For long-term storage, vials are kept at −135° C. or in liquid nitrogen.

[1698] Feeder Layers for ES Cells: Mitotically inactivated (3,000 rads of y-irradiation) MEFs at 2.5×10⁶ cells/dish (“dish” refers to a 10 cm diameter culture dish unless otherwise specified) are used. To achieve a uniform monolayer of feeders, plates are coated with 0.1% (w/v) gelatin for at least 5 min prior to plating cells. Feeders are either pre-plated or co-plated with ES cells. If the cellsa e to be co-plated, or if no medium change is planned before addition of ES cells, it is important to wash the feeder cells out of DMSO by centrifugation because ES cells are sensitive to this compound.

[1699] Routine Culture of ES Cells: ES cells are cultured MEFs (which are at a density of 2.5×10⁶/dish) for up to 10 days. ES cells are plated at relatively high density, 3×10⁶ to 10⁷/dish. They grow rapidly, and divide every 18-24 hr. ES cell cultures are fed daily with ES cell medium. The cells need to be passaged about every third day, and require a second feeding on the day before passage. Generally, higher viability is achieved if the cells are re-fed 2-3 hr prior to any trypsinization (for passaging or freezing).

[1700] Passaging ES Cells

[1701] 1. After rinsing the monolayers, 2 ml of prewarmed trypsin-EDTA is added to each dish which is held at 37° C. for about 5 min at which time the cells visibly detach. Trypsin action is stopped by adding 2 ml of ES medium. Cells are dispersed thoroughly with a Pasteur pipette and transferred to a conical centrifge tube with an additional 6 ml of medium. The cells are spun for 2 min at 500 rpm. This treatment is important because ES cells do not grow well in the presence of trypsin.

[1702] 2. The supernatant is removed by aspiration and replaced with 2 ml of fresh ES medium, in which the cells are dispersed by gentle pipetting (to avoid bubbles, etc.) with a Pasteur pipette 20 times. Thorough dispersal of ES cells is important as aggregates are more likely to differentiate.

[1703] 3. For passage, ES cells are usually split 1:6, although higher density may be desired. Even before confluence ha been reached, cultures can be split in order to disperse the ES cell colonies to prevent their differentiation.

[1704] Freezing and Thawing ES Cells.: The ES cells are re-fed 2-3 hr before trypsinization (see above) for freezing. They are frozen at high density; the contents of one confluent dish geneeally becomes six 1-ml vials. ES cells are especially sensitive to DMSO toxicity, so exposure is minimized by resuspending cells (with thorough dispersal) in ice-cold medium without DMSO first, and then adding an equal volume freezing medium which contains 2× DMSO. Vials are frozen slowly for 24 hr at −80°, then store at either −135° or in liquid nitrogen for long-term storage.

[1705] For use, the ES cells are thawed rapidly in a 37° water bath and quickly transferred to ice. The cells are spun out of DMSO in about 10 ml of ES medium, resuspended with thorough dispersal and are plated on feeder cells as described.

[1706] Transfection of ES Cells by Electroporation

[1707] 1. Linear DNA is prepared cconventionally by phenol-chloroform extraction and ethanol precipitation. Vacuum-dried DNA is resuspended in sterile HBS. An aliquot is checked for degradation by comparing restriction maps of linearized and intact plasmid DNA using multiple restriction enzymes.

[1708] 2. Cells are split 1:6 as usual, 1 or 2 days prior to electroporation. Cells are fed daily and again 2-3 hr prior to electroporation. Cells are trypsinized as usual but, on dispersal of cells, about 10 ml of medium is added and returned to the incubator for 30 min. This pre-plating allows about 90% of feeder cells to reattach, further enriching ES cells. Cells are washed twice in HBS and an aliquot is counted.

[1709] 3. The cells are resuspended in ice-cold HBS at 2.5×10⁷ cells/ml. Linearized DNA is added from a concentrated stock in sterile HBS to a final concentration of 25 mg/ml, and the tubes are placed on ice for 10 min. After mixing with a Pasteur pipette, cells plus DNA are transferred into an electroporation cuvette (Bio-Rad, Richmond, Va.) and are kept on ice for 10 min. Each electroporation cuvette holds 0.8 ml, equivalent to about 2×10⁷ cells.

[1710] 4. Electroporation is carried out at 240 V, 500 mF with the Gene Pulser (Bio-Rad, Richmond, Va.) with a capacitance extender. The cells are allowed to rest for 10 min at room temperature after which they are plated with, neomycin-resistant feeders (but no selection drugs) at about 5-7×10⁶ ES cells/dish.

[1711] Selection of Targeted Clones: Beginning at 24-36 hrs after electroporation, the cells are fed daily with selection medium until selection is complete (usually 7-8 days). Cell death is observed by 3-4 days after drug addition. Selection Medium includes G418 (Geneticin; GIBCO-BRL) final concentration. The G418 is dissolved in HEPES buffer. The final concentration G418 is 200 mg/ml if PGK-neo is in the targeting construct. If pMCI-neo is in the construct, then a 150 mg/ml solution is used. For double selection, ganciclovir (Syntex Corp., Palo Alto, Calif.) is included at a 2 mM final concentration. An alternative to gancyclovir is FIAU (Bristol Meyers Squibb, Wallingford, Conn.), which is used at 0.2 mM.

[1712] Culture medium is replaced by selection medium beginning at 24-36 hr of culture. One or two plates are grown in G418 medium only, and are used to calculate the number of neomycin-resistant colonies. Cells are fed daily. Cell death is visible at about 3-4 days of selection. The colony morphology is observed carefully. Some large colonies start flattening. Clones are picked routinely at day 7 or 8 of selection before they start differentiating (but flattened colonies may still contain ES cells and can be picked). Plates are stained with Giemsa, and colonies counted on day 10 of selection.

[1713] Other Selection Measures: The above procedures are suitable for the commonly used schemes involving the neo gene as positive selection marker and the HSV-TK gene as the negative selection marker. If hyg, HGPRT- or puromycin-resistance genes are used, the feeders are modified accordingly. One can either obtain a line of mice with the appropriate transgene or use a feeder cell line just during the time of selection. A line of STO cells doubly resistant to neomycin (G418) and hygromycin can also be used. ES cells can, and should, be returned to feeder cultures at the time of picking the clones. Selection for HGPRT is in “HAT medium” which is standard medium supplemented with 0.1 mM hypoxanthine, 0.8 mM aminopterin and 20 mM thymidine. Hygromycin selection utilizes conccentratios ranging from 100 to 150 mg/ml and should be tested to determine the effective concentration.

[1714] Picking Drug-Resistant ES Cell Colonies: Clones are usually picked after 7 or 8 days of selection. Each clone is picked into an individual well of a 96-well plate containing trypsin-EDTA. Each trypsinized colony is then split into a single well of duplicate 24-well plates, so that 1 plate can be used for freezing, and the other for DNA extraction for Southern blot or PCR analysis. The transfer of cells between 96-well plates and 24-well plates is accomplished with a 12-channel pipettorwit tips in alternating channels. This allows the transfer of clones from wells #1, 3, 5, 7, 9 and 11 oof a 96-well plate into wells #1, 2, 3, 4, 5, and 6 of a 24-well plate.

[1715] Trysinization of Selected Clones

[1716] 1. Selection plates are fed 2-3 hr before picking colonies. The number of colonies to be picked is estimated, and 24-well plates with about 10⁵ MEF/well in 0.5 ml are prepared. Each colony is split in half into wells of duplicate 24-well plates.

[1717] 2. After washing once, trypsin-EDTA at 37° C. is placed in 1 row of a 96-well plate (60 μl/well). Colonies are picked rapidly in groups of 12 (one row), and the trypsin-EDTA is maintained at 37° C. Individual clones are picked by tearing each away from the surrounding feeder cells, using a ripping/tearing motion, and drawing each gently into the pipette. Before approaching a colony, the pipette is partially filleed with PBS from the plate to prevent sticking of the colony to the glass, using as little volume as is suffficient to prevent the colony from sticking. Each clone is transferred to a well of the 96-well plate containing trypsin-EDTA.

[1718] 3. Six pipette tips are connected to the multichannel pipettor (channels 1, 3, 5, 7, 9, and 11) and clones 1, 3, 5, 7, 9, and 11 are dispersed by pipetting up and down several times. The cell suspension in 30 μl is transferred to the first row of one 24-well plate (prepared as above) and the remaining 30 μl to the first row of the duplicate 24-well plate. Clones 2, 4, 6, 8, 10, and 12 are dispersed and transferred in an analogous manner. (Alternatively, the trypsin reaction is stopped after picking 12 colonies in the first row of the 96-well plate by adding 60 μl complete medium and dispersing the cells. One can then pick the next 12 colonies into the second row. This is most helpful when the selection plates contain more than 12 colonies.) The cells are fed as soon as possible and then daily with 0.5 ml of complete medium.

[1719] Freezing Expanded Colonies: One of the duplicate 24-well plates is used. Cells are frozen when many of the wells are subconfluent, even if some wells are still sparse. This is important to ensure that the majority of the colonies have not grown too large and the cells begun to differentiate. Cells are frozen, at this stage only, in medium containing 10% (v/v) DMSO, fetal calf serum, and trypsin-EDTA. For this relatively short-term storage, the trypsin-EDTA does not appear to harm the cells.

[1720] 1. The cells are fed 2-3 hr before freezing. 120 μl of an ice-cold solution of 20% (v/v) DMSO and 80% (v/v) FBS (“ECS solution”) is placed in each Costar cluster tube and maintained on ice. The cells are washed with warm PBS and trypsinized with 60 μl of pre-warmed trypsin-EDTA for 5 min at 37° C. The plate is moved to ice, and each well receives 180 μl of ice-cold ECS. The cells are dispersed by pipetting up and down with six tips of the multichannel pipettor. Two frozen vials of each clone are prepared by transferring 120 μl of the suspension (clones 1-6) into one cluster tube (tubes 1, 3, 5, 7, 9, 11) and the remaining 120 μl into the neighboring tube in the same row (tubes 2, 4, 6, 8, 10, and 12). Thus, each row of clustered tubes corresponds to each row of the 24-well plates.

[1721] 2. To freeze the cells slowly, the cluster tube rack is wrapped in paper towels, placed at −20° for about 1 hr, then transferred to −70°. The cluster tube racks are maintained at −70° until positive clones are identified.

[1722] DNA Isolation for Genomic Southern Blot Analysis

[1723] 1. Clones are grown until most are confluent. High-quality DNA can be extracted even from overgrown clones. Wells are washed with PBS, 200 μl of lysis buffer are added to each well, and incubated at 37° for 30 min. Plates are stored frozen at this point. The lysis buffer: consists of 150 mM NaCl, 20 mM Tris (pH 7.5), 5 mM EDTA, 0.5% (w/v) sodium dodecyl sulfate (SDS), proteinase K (0.25 mg/ml).

[1724] 2. Lysates are transferred to 1.5-ml tubes. Racks are arranged to fit the format of a 24-well plate so that a 12-channel pipettor can be used to process the samples through all the steps.

[1725] 3. Lysate is extracted with an equal volume of phenol-chloroform; the mixture is vortexed, centrifuged and the organic phase is removed using a 12-channel pipettor. The amterial is then extracted with chloroform-isoamyl alcohol. The aqueous phase is transferred to clean tubes and precipitated with 20 ml of 3M sodium acetate (pH 5.2) and 0.5 ml ethanol, at −20° for 30 min.

[1726] 4. The pellets are resuspended in 10 mM Tris-HCl (pH 8.0), 1 mM EDTA (TE). The precipitation is repeated as described above, the pellets are dried and resuspended in TE. To dissolve DNA, the solution is left at room temperature for several hours or at 65° C. for 15 min. A confluent well from a 24-well plate yields approximately 10 μg of genomic DNA. One-half or one-third of each sample is digested with restriction enzymes. To aid in complete digestion, a relatively large (100 ml) volume is used and allowed to proceed overnight. The digests can then be precipitated or reduced in volume in a Speed-Vac (Savant, Hicksville, N.Y.) before loading on a gel.

[1727] Polymerase Chain Reaction Screen of ES Cell Clones.

[1728] An alternative to the Southern blotting screen described above is to use the PCR, which is done on pools of clones. Characterization of ES cell clones by PCR in pools of 12 (blot analysis of PCR products is usually required) is performed as follows. Clones are maintained in culture during this quick initial screen. Positive pools are rescreened as individual clones by PCR, and subsequently confirmed by genomic blot analysis. A PCR primer is characterized that is within the targeting vector (usually in the positive selection marker) and another in genomic DNA outside the targeting vector. These primers are tested for their lowest detection limit and extent of cross-homology. To ensure reliable amplification in small amounts of genomic DNA, the amplification distance is only about 1 kb. This limits the homology with the locus to be targeted that is included in the targeting vector and thus. decreases targeting frequency.

[1729] 1. Drug-resistant colonies are picked by the procedures described above, except allow colonies to settle overnight in 96-well dishes with feeders. Each colony is split into two 96-well dishes by trypsinization of the attached cells. One dish is for PCR analysis and the other is expanded. Each dish has a feeder cells and 0.2 ml of medium. Using a multi-channel pipettor, routine trypsinization is performed using no more than 50 ml of trypsin-EDTA. After thorough but gentle dispersal of cells, 25 ml is transferred to each 96-well dish with 0.2 ml of medium per well. The cells are still in dilute trypsin but can tolerate it overnight, which is enough time to settle. They are refed after 12 hr.

[1730] 2. One to 2 days after the initial split, the cells are trypsinized from 1 of the duplicate 96-well dishes as usual, but do not add medium with serum.

[1731] 3. Samples are combined by row (12 wells/pool) by dispersing in trypsin-EDTA, followed by a rinse with PBS. Microfuge the pools for 3 min. to spin down the cells.

[1732] 4. All but 5 ml of supernatant is removed and the pellet resuspended in 50 ml of water and frozen on dry ice.

[1733] 5. Cells are thawed at 95° for 8 min and cool. 10 mg of proteinase K (fresh aliquot) is added, incubated at 55° for 30 min. and incubated at 95° for 8 min. and cooled.

[1734] 6. Components for a standard 100-ml PCR reaction are added. 20 ml of each PCR reaction is run on an agarose gel and blot (various quick-blot procedures are adequate). Probe with subclone of partial amplification product.

[1735] 7. The remainder of each clone is expanded by continued culturing until the results of pooled PCR analysis are complete and fed daily.

[1736] 8. Once the PCR results are in, all clones are individually passed within each positive pool to a 24-well plate with feeders. One-half of each sample is saved for PCR analysis as an individual clone.

[1737] 9. The cells are fed daily. After 3 days, once the PCR analysis of clones is complete, each positive clone is placed on a 35- or 60-mm plate with feeders to expand for freezing (see below). Feed daily.

[1738] Thawing and Expanding Targeted Clones: For each positive clone, thaw one of the cluster tubes rapidly in a 37° water bath, then cool on ice. Do not spin. Plate on a 35-mm plate with feeder cells (4×10⁵ feeder cells per plate) in 2 ml of complete medium. Feed after 12 hr. At this point, cells are cultured in normal medium without G418; it has been reported that cells maintained in G418 have a lower capacity to contribute to the germ line of injected embryos. Depending on the density of each clone, split up to 1:6. Freeze as soon as possible in small aliquots. Freeze enough aliquots for one aliquot per day of blastocyst injection. A subconfluent 60-mm plate can be frozen as eight 250 ml aliquots, in 90% (v/v) FCS and 10% (v/v) DMSO. Such an aliquot can be plated directly after thawing into one or two 35-mm plates with feeder cells, 2 days before injection.

[1739] Further Characterization of Targeted Clones: Positive clones detected by the above procedures are retested using several different: restriction enzyme digestions to ensure appropriate insertion of the selectable marker into the locus; both flanks of the insertion are checked. To determine if targeted clones have any additional insertions of the targeting vector, DNA is tested with a probe containing the neo gene. Only a single band at the expected size is detected after long exposure. A further simple check of the condition of targeted cells is to count chromosomes:

[1740] 1. A rapidly growing culture is treated with Colcemid (0.06 mg/ml) for 4 hr.

[1741] 2. Cells are trypsinized, washed in PBS, and combined with washed cells from culture supernatant.

[1742] 3. The cells are resuspended in 10 ml of 0.56% (w/v) KCl, incubated at room temperature for 8 min. and spun at 300 rpm for 2 min. at room temperature.

[1743] 4. All but 100 ml of supernatant is removed and the cells resuspended. 10 ml of fixative [3:1 (v/v), methanol-glacial acetic acid] is added dropwise and incubated for 10 min.

[1744] 5. The cells are spun and resuspended in 1 ml of fixative.

[1745] 6. The cells are dropped, from a height of 10 cm, onto glass slides (2-3 drops per slide, cleaned with ethanol and dried). After the liquid has spread to the edges of each slide, blow dry.

[1746] 7. After they are completely air dried, stain the slides for 15 min. in 3% (w/v) Giemsa in PBS, wash in water and air dry.

[1747] 8. To count chromosomes is to photograph the slide on print film so that counted chromosomes can be marked. At least 30 spreads/clone are counted. At least 50% of the spreads have 40 chromosomes. Watch out for spreads with too many chromosomes as well as those lacking chromosomes.

[1748] Generation and Breeding of Chimeric Mice: The animal and equipment requirements and procedures for generating chimeric mice by injection of ES cells into blastocysts is as follows. C57BL/6 mice are used as embryo donors and strain CD1 as foster mothers. Contribution of ES cells, which are derived from strain 129/Sv mice and have agouti coat color, is clearly evident in contrast to the black coat color of the donor embryo.

[1749] The following procedure yields healthy ES cells as a single-cell suspension. Two days prior to blastocyst injection, one of the frozen aliquots [90% (v/v) serum, 10% (v/v) DMSO] is thawed rapidly in a 37° water bath and plated directly into two 35-mm dishes with feeder cells (4×10⁵ feeders per plate). The medium is replaced the next morning, daily, and 2 hr before trypsinization. One plate is trypsinized at the beginning of an injection session and the second about 3 hr later, in freshly prepared 0.25% (v/v) trypsin (GIBCO-BRL) 0.02% (v/v) EDTA in PBS at 37° for 5 min. Cells are gently dispersed after adding an equal volume of ES cell medium and pellet. Cells gently resuspended (by drawing them in and out of a Pasteur pipette 20 times) in 2 ml of ice-cold ES cell medium and kept on ice until transfer to the injection chamber.

[1750] General guidelines for blastocyst injection: The procedure requires an inverted microscope with interference-contrast or phase-contrast objectives. The magnification range required is ×40 to ×200. The injection microscope is equipped with a cooling stage (blastocysts are more resilient to the injection procedure when they are kept at 5-10°). A pair of micromanipulators is used one for the holding pipette and one for the injection pipette. The manipulators from Leitz Instruments are especially useful. Flow in each pipette is regulated by hand, using a micrometer to adjust a Hamilton syringe. To obtain donor embryos, a stereo dissecting microscope (total magnification, ×20) is required for flushing blastocysts from the uterus and collecting them for culture. Blastocysts are cultured in a tissue culture dish, in microdrops of medium under light-weight paraffin oil, in 5% C02 in air at 37° During an injection session, several small batches of blastocysts are transferred from culture to the injection chamber with trypsinized ES cells. The easiest blastocysts to inject are those that have expanded fully but have not yet hatched from the zona pellucida. Loading ES cells into the injection pipette is done with care so as not to damage the cells. The injection pipette is just large enough to accommodate the ES cells, but not much larger, because damage to the blastocyst would be more likely to occur. Each blastocyst is injected with 15-20 ES cells. After injection, the blastocysts are returned to culture for at least 1 hr before surgical transfer to a pseudopregnant female. The surgery is performed on the bench with general anesthesia, using a stereo dissecting microscope. Each female receives 10-12 blastocysts; uninjected blastocysts are transferred along with injected ones, to help prevent complications in the pregnancy due to small litter size.

[1751] Chimeric animals are monitored by coat color. The 129/Sv-derived ES cells give rise to an agouti (brown) coat whereas the recipient C57BL/6 embryos produce black coat color. Desirable chimeras have a high proportion of brown coat. To determine if targeted ES cells have contributed to the germ line of chimeric mice, male chimeras are bred with C57BL/6 females. Agouti pups are the result of ES cell-derived sperm. If the targeted mutation is heterozygous viable, then one-half of the agouti pups will carry the targeted allele. However, if none of the chimeras derived from a given ES cell clone has high coat color chimerism then germ line transmission is unlikely. Discard chimeras if none of the first 60 pups contains the targeted allele and, because most ES clones give chimeras of which around 50% give germ line transmission, we would discard a clone if none of the first 5 or 6 chimeras gives agouti pups.

[1752] It is necessary to obtain germ line transmission from at least two independently derived ES cell clones in order to ensure that any phenotype of the resulting mice arises from the targeted mutation and not from some other mutation that occurred during handling of the ES cells.

[1753] Genotyping Mice: Tail Blots and PCR Analysis

[1754] Genomic DNA, isolated from tail biopsies, is analyzed by either Southern blot or PCR. Generally, mice must be at least 3 weeks old to tolerate the general anesthesia used in cutting the tail. With a fresh razor blade, cut a 1-cm length from the tip of the tail and cauterize the remaining tail with a soldering iron. DNA is isolated by a simplified procedure that is amenable to large numbers of DNA samples. Transfer the tail biopsy to a 1.5-ml tube that contains 0.5 ml of tail lysis buffer: 100 mM Tris-HCl (pH 8.5), 5 mM EDTA, 0.2% (w/v) SDS. 200 mM NaCl, proteinase K (100 mg/ml) (Boehringer Mannheim, Indianapolis, Ind.). Continuously rotate the samples overnight at 55° and Vortex the tubes, and spin down hairs and tissue debris in a microfuge for 5-10 min. Transfer the supernatant to a fresh tube containing 0.5 ml of 2-propanol and mix thoroughly. Recover the precipitate with a pipette tip and transfer to a fresh tube containing 100 ml of 10 mM Tris-HCl, 0.1 mM EDTA, pH 7.5. Make certain that DNA is dissolved by incubation at 37° with intermittent vortexing.

[1755] To analyze tail DNA by Southern blot, a single-copy probe that hybridizes with wild-type and targeted alleles is required. Generally such a probe has already been characterized for use during screening for targeted ES cells. Generally 15 ml of DNA prepared as above is sufficient for one lane of a Southern blot. Restriction digestion should be carried out in a final volume of at least 50 ml, with at least 40 units of enzyme and in the presence of bovine serum albumin (BSA; 0.1 mg/ml) and 4 mM spermicide. Digestions usually require several hours to overnight for completion. If the DNA does not digest well, a phenol-chloroform extraction followed by reprecipitation is likely to help. A variety of standard blotting procedures suitable for genomic DNA can be used. Capillary blotting to a nylon membrane, ultraviolet (UV) cross-linking, and hybridization in sodium phosphate and SDS at 65° work well.

[1756] As an alternative, PCR amplification of unpurified tail DNA using appropriate PCR primers can be used. Tail (5-10 mm) is added to 0.4 ml of PCR tail buffer 150 mM KCl, 10 mM Tris-HCl (pH 8.3), 2.5 mM MgCl₂, gelatin (0.1 mg/ml), 0.45% (wlv) Nonidet P-40 (NP-40), 0.45% (w/v) Tween 20]. Incubate overnight at 55° with shaking and with addition of two 25 ml aliquots of proteinase K (10 mg/ml) added at an interval of several hours. Heat at 95° for 10 min to denature residual proteins, cool to room temperature, and spin. Five microliters of each DNA sample should give definitive ethidium bromide signals after PCR amplification with primers for each allele.

[1757] To analyze DNA by PCR, primer pairs are designed that indicate the presence of the wild-type allele versus the targeted allele. This is accomplished as follows: First, both alleles are assayed by a set of three primers, one of which is within the neo gene, as described in Polymerase Chain Reaction Screen of ES Cell Clones, above. Alternatively, separate primer pairs are used to assay the alleles:one pair within the neo gene, and the other pair in the wild-type gene. In both these strategies, designing primers that yield amplification products of different sizes allows detection of both alleles in a single reaction tube and gel lane. Care is taken not to contaminate reagents with amplification products. Organization of reagents into single-use aliquots is highly recommended.

[1758] Generation of Homozygotes: To determine if homozygous mutant animals are viable, heterozygous crosses are performed and all pups genotyped at weaning. The expected 1:2:1 ratio of genotypes, or lack of it, becomes evident in three to four litters. However, genotype ratios are kept for all heterozygous crosses performed. Ideally, mice derived from two or three independent targeted clones are available. Heterozygous crosses is carried out for each targeted clone, as well as between clones. The interclonal crosses show that any phenotype is the result of the targeted mutation rather than some other mutation occurring in the ES cell clone.

[1759] For a homozygous viable mutation, the next job is to show that the targeted mutation is truly a null allele. Procedures will depend on the gene/protein of interest. This has been performed quite thoroughly for the tenascin-deficient mice and for P-selectin-deficient mice at both the mRNA and protein level.

### EXAMPLE 53

### Animal Models of Infectious Diseases for Testing Superantigen-Lip-IDA Conjugates, Anti-Sense Oligonucleotides, Gene Knockout Mice, Immune Cells Deleted of Inhibitory IR_{IDA} and/or ITIMs or ITAMs

[1760] Abbreviations: IR_{IDA}=Inhibitory Receptor for Lipid-Based Infectious Disease Associated Antigens, Lip-IDA=Lipid-Based Infectious Disease Associated Antigens, IR_{sAg}=Inhibitory Receptor for Superantigens, IR_{TAA}=Inhibitory Receptors for Lipid-Based Tumor Associated Antigens.

[1761] Tuberculosis:

[1762] C57BL/6 Bg/Bg mice, which are NK cell-deficient, are infected with any one of a nontuberculous species of mycobacteria: M. avium Complex, M. kansasil, M. simiac, M. malmoense or M. genavense. Same-sex mice aged 5-7 weeks are allowed to acclimate for 1 week in the facility before being used. They are housed in microisolator units (Lab Products, Maywood, N.J.) and are randomly distributed six to a group.

[1763] Inoculum and Infection Process: Primary cultures of MAC (M. kansasii or other mycobacteria) to be used for infection are obtained from clinical isolates of patients with disseminated MAC infection, or the American Type Culture Collection (ATCC). ATCC 49602 (serotype 1) strain LPR and MAC 101 (provided by Lowell Young, California Pacific Medical Center Research Institute, San Francisco, Calif.) are used. Organisms are grown in modified 7H 10 broth (7H 10 agar formulation with agar and malachite green omitted), pH 6.6, with 10% (vol./vol.) Middlebrook oleic-acid-albumin-dextrose-catalase (OADC) enrichment (Difco Laboratories, Detroit, Mich.) and 0.05% (vol./vol.) Tween 80 (Sigma, St Louis, Mo.). Broth cultures are started from one transparent, smooth, flat colony (SmT) grown on an agar plate. The culture tube is placed in an orbital shaker and incubated at 37° C. for 3-5 days. Culture suspensions are predorminately (>95%) of the smooth, transparent, and flat (SmT) phenotype which is more virulent and more resistant to antimycobacterial agents than the smooth, domed, opaque (SmD) or rough phenotypes. After incubation, the culture is diluted in 7H10 broth to a concentration of 10 Klett units/ml (Manostat colorimeter, Manostat, New York, N.Y.) or approximately 5×10⁷ cfu/ml. The inoculum is titrated in triplicate on 7H10 agar plates (Difco) supplemented with 5% (vol./vol.). Middlebrook OADC enrichment. Plates are taped with Blenderm® (3M, St Paul, Minn.), incubated for 2-3 weeks at 37° C., and then counted to determine the precise inoculum.

[1764] Treatment Schedule and Controls

[1765] 1. Aerosol infection at low doses: The preferred model is to expose mice to a very low inoculum of bacilli using an aerosol generation chamber. After uptake of about 50 bacilli in the lungs the infection grows progressively at first and is then curtailed around 20 days. Laboratory strains of mycobacteria such as Erdman attain 4-5 logs in the lungs by this time. More virulent strains such as CSU93 (Tennessee outbreak) and strabn W (New York) can grow to between 6 and 7 logs in this time.

[1766] 2. Intravenous infection at high doses: The high-dose intravenous model is also employed. Most of the inoculum is taken up by phagocytes in the spleen and liver and only 1-2% can be detected in the lungs. The organisms grow progressively for 10-15 days in the spleen, and to a lesser extent in the liver, until acquired immunity is generated, resulting in a “chronic” disease pattern. Thus, the genetic construct under test is given soon after inoculation or after the disease has become chronic. This more closely resembles the human condition as the patient is probably at this stage before initial diagnosis.

[1767] The inoculum is injected iv in a 0.2 ml volume using a 0.5 ml syringe with an attached 28 g needle to deliver a total of approximately 10⁷ cfu/mouse. Each experiment consists of an early control group (sacrificed 1 week postinfection at the initiation of therapy) and a late control group (sacrificed at the end of therapy), neither of which receives any treatment. One treatment group consists of a drug with known to activity (e.g., azithromycin or clarithromycin). Treatment is started 7 days postinfection and is generally continued for 10 days in succession. In extended therapy experiments, treatment is given daily (Mon-Fri) for 4 or more weeks.

[1768] Mice are weighed at the beginning and end of each trial, and averaged by group. Mice are evaluated daily, and changes in appearance or behaviour are noted. In general, infected mice appear outwardly well, and continue to gain weight with these infections. There have been some exceptions where the infected control animals have succumbed to the infection. Untreated mice develop splenomegaly, hepatomegaly (with visible lesions), and enlarged lungs. Splenomegaly, although minimal, is evident at 1 week postinfection (average weight 0.12-0.14 g) and continues to increase for the duration of the trial (average weight 0.65-0.80 g at 18-20 days postinfection). After 1 week of infection, the usual organ bacterial counts in the lungs of early control mice (10^{4.5}) is significantly less than that in the spleen (10⁷). The late control mice (19 days postinfection) average 10⁶ and 10^{7.8} cfu in their lungs and spleens respectively.

[1769] At the completion of the trial (2 days after the end of the treatment phase), mice are euthanized. Their spleens and right lungs are aseptically removed. Spleens are weighed. Each organ is placed in a grinding assembly containing normal saline and Tween 80 and each sample is ground and allowed to sit for 15 min to allow for settling of aerosols. The tops of the grinding assemblies are removed and an aliquot is removed. Dilutions are made to the appropriate concentrations for plating using tubes containing double-distilled H₂O (to promote red blood cell lysis) with saline-Tween 80.

[1770] Spleen weights are used to estimate dilutions for the plating of the homogenate. Large spleens, such as those belonging to members of the late control group, are heavily infected and need to be diluted. The lungs are less infected than the spleens in this model and usually require 10-100 times less dilution. Each organ is plated at three different dilutions on 7H10 agar (Difco) plates containing 5% OADC enrichment. Plates are incubated for 2-3 weeks and counted to determine viable cell counts, which are expressed as counts/organ.

[1771] Key Parameters to Monitor Infection and Response to Treatment: Mice show some or all of the following signs of infection: a hunched posture with or without difficulty ambulating, isolation from the rest of the group in their cage, labored breathing, and shivering, lack of eating and/or drinking and diarrhea.

[1772] Upon introduction of a new agent, mice are monitored initially and during the first hour for any indications of pain or discomfort, allergic reaction or swelling. During the first 3 days of therapy, the mice are monitored at least twice daily to note their general appearance. Any injection site is inspected for swelling or irritation. The general condition of the animals is carefully noted. Mice having an acute reaction are euthanized immediately.

[1773] Therapeutic Regimen and Treatment Schedule: Therapy is begun 7 days postinfection. Determination of the spleen and lung viable bacterial cell counts is done several days after the completion of therapy. Although daily treatment for 10 days allows for differentiation of relative activities, longer treatment periods (4-12 weeks) are useful to characterize efficacy.

[1774] Administration of the therapeutic constructs is started on day 20 (when the first animal becomes DTH-positive) and is continued 2-3 time weekly for four weeks. Bacterial loads are determined at 35 and 50 days. Isoniazid (25 mg/kg/day) is given as the positive control drug in each trial.

[1775] Outcome: Treated animals show elimination and/or reduction of viable organisms in the spleens and lungs or spleen weights of therapy groups in comparison to those in the spleens and lungs of the control (infected, but untreated) groups. These differences are statistically significant using the Wilcoxin rank test or other statistical method known in the art. Additional comparison is made between the therapy groups and the group given a standard therapy such as clarithromycin or azithromycin.

[1776] Leishmaniasis: Infection Procedure: BALB/c mice are infected iv to give the quickest and most reproducible infection in the liver, spleeen and bone marrow. The inoculum of parasites, either amastigote or promastigotes, is loaded into a 1 ml syringe fitted with a 23 g needle. For experimental infection, an inoculum of 10⁷ amastigotes in a volume of 0.1 to 0.2 ml is injected intravenously (or in hamsters, by the intracardiac route). This will produce a microscopically detectable infection in the liver of mice and liver and spleen of hamster after 1 week of infection. This level is suitable for tests of the therapeutic constructs desccribed herein.

[1777] Administration of Therapeutic Constructs: Therapeutic constructs [David: what are they?] are administered to mice by a variety of routes (s.c., ip. and p.o.) and for some formulations i.v. administration by the tail vein is required. In the mouse model, treatment is best evaluated against an established infection on days 7-11 post-infection. If a lower infection inoculum is used, tests can be carried out on days 14-18 post-infection. In the commonly used BALB/c mouse the infection in the liver increases linearly until days 21-28 following infection by 10⁷ amastigotes or promastigotes; after this point the liver infection becomes chronic and eventually cure. The spleen infection, although microscopically detectable from week 1, is fully established after the week 4. If the infection is left untreated for several weeks prior to treatment, chronic granulomatous infection is established which has been shown to be less sensitive to standard drugs.

[1778] In an alternative approach in mice,, treatment with therapeutic constructs is started immediately after infection. A 5-day course of treatment is sufficient to determine relative potencies of the constructs.

[1779] Outcome: In the early stages of infection VL [David: what is VL?] in mice presents no obvious external symptoms. Extra mice or hamsters are infected and sacrificed prior to administering the conjugates to check that the infection is established. Microscopic examination of stained slides prepared from the liver and/or spleen of will indicate whether the inoculum was satisfactory and that infection has been established. The appearance of hamsters does change in the later stages of infection. The most noticeable features are weight loss and dulling of the hair. Occasional hamsters may develop ascites. These clinical changes in the untreated controls are contrasted with changes in the treated population. The treated groups show none of these changes in the course of therapy.

[1780] At the end of treatment the mice are weighed to give an estimation of drug toxicity. The livers and spleens are removed from freshly sacrificed animals and weighed. Smears are prepared from the livers and spleens on microscope slides, fixed in methanol for 1 minute and stained with Giemsa stain for 45 minutes. The number of parasites per 500 liver cells and/or spleen cells is determined microscopically for each experimental animal. This figure is multiplied by total organ weight (mg) and this figure, the Leishman-Donovan unit (LDU) is used as the basis for calculating the difference in parasite load between treated and untreated animals. Treated animals show complete elimination or reduction in the number of parasites/500 liver and/or spleen cells. The difference in parasite loaded between the treated and control groups is statistically significant using the Wilcoxon rank test. The activity of novel compounds is compared with that of the standard antimonial drugs and expressed as a therapeutic ratio.

[1781] Trypanosoma cruzi {Chagas Disease): Chagas disease has been observed in different mammal species. Several animal models have been used experimentally—mice, hamsters, dogs, rats, rabbits and monkeys. The course of the T cruzi infection varies widely between these species, depending upon the host and parasite strains used, the route of inoculation and the size of the inoculum.

[1782] Mouse Model: The mouse model is cheaper, easy to work with and it can produce both the acute and the chronic phases of the disease. Various mice strains differ markedly in their resistance to T cruzi. More resistant strains might providea good model for the chronic disease. At this stage, the murine model of Chagas' disease is used in experimental therapy. Several strains of mice have been used in this model: Swiss, weight 18-20 g, female; Balb/c, 8-10 weeks, female; albino [what is albino? it's a mutation and coat color, not a strain!!], weight 18-20 g male. Preliminary experiments are performed to determine the optimal parasite inocula to insure infection. The parasites are maintained by serial passage through female C3II/IIe mice, a resistant strain. Mice with parasitemia are bled into heparinized (1000 UA) PBS (50:50) and cryopreserved.

[1783] Hamster model: Hamsters (non-isogenic Syrian hamsters, Mesocricetus auratus, male/female) are infected with T cruzi. During the acute phase an inflammatory reaction is observed characterized by mononuclear and polymorphous leukocyte infiltration of variable degree in the majority of tissues and organs. In the chronic phase the same kind of lesions can be observed, but the inflammatory process is less severe and characterized by mononuclear infiltration in the myocardium (Ramirez L E, et al., Rev Soc Bras Med Trop, 1994 27:163-916). The authors noted high levels of parasitemia in the beginning of the infection, which varied with the strain used.

[1784] Parasite Strain & Stages of Disease: Different parasitic strains behave quite differently in experimental Chagas' disease with regard to characteristics such as the course of infection, the degree of parasitemia, tissue tropisms, histopathological changes and mortality. Several strains of T cruzi have been used in different animal model and include Y Ernane, Benedito and Vicentina. Strains of T. cruzi, from different geographical areas, had previously been characterized into various types according to their infectivity rate and tropism in mice. The classification includes the following:

[1785] 1. Type I, characterized by a rapid course of infection in mice, high levels of parasitemia and mortality around the 9^{th} and 10^{th} day of infection, with predominance of slender forms and macrophage tropism during the acute phase of the infection.

[1786] 2. Type II shows increasing parasitemia from the 12^{th} to the 20^{th} day of infection, low mortality rate, predominance of broad forms of the parasite and myocardial tropism.

[1787] 3. Type III shows a slow development of parasitemia that reaches a high level 20-30 days after inoculation, low mortality and predominance of parasitism in skeletal muscles.

[1788] Inoculation & Infection Process: The inoculum range is usually from 10³ to 10⁷ trypomastigotes (obtained from infected animals) or 2-4×10³ metacyclic trypomastigotes (obtained from triatomid bugs). Acceptable inoculation routes are intraperitoneal and conjunctival. Mice weighing. 18-20 g are inoculated by the intraperitoneal route with 5×10⁴-1×10⁵ trypomastigotes which produces a homogeneous infection. Daily trypanosome counts provide the following pattern for the parasitemia: parasites appear from the 4^{th} or 5^{th} day after inoculation, their number decreases markedly on the 6^{th} day, increases until the 7^{th} or 8^{th} day, and decreases again around the 9^{th} day. From the 10^{th} day onwards the pattern of parasitemia is irregular. Most infected animals die in the period from the 5^{th} to the 20^{th} day after inoculation; the highest mortality rates are observed around the 15^{th} day. Mortality rates are about the same for both sexes and only a small number of infected animals will outlive 40 days.

[1789] The administration of constructs begins on the day after inoculation and doses corresponding to about one-fifth of the LD₅₀ are given for 10 consecutive days. On the 5^{th} day after inoculation the number of parasites in 5mm³ of blood is determined. On the 8^{th} day, when the number of parasites in the inoculated animals is generally higher, a new count is performed.

[1790] Outcome: The best initial criteria for therapeutic activity in the experimental Chagas' disease is mortality and parasitemia. Parasitemia is usually high with little variation, depending on the strain used and follow-up is done by daily fresh blood examination. The blood is collected and the parasites counted in a Neubauer's chamber. The acute phase of the infection is followed by a chronic stage in which parasites are reduced to submicroscopic level, then indirect laboratory methods are used, such as subinoculation, xenodiagnosis and serological techniques. The polymerase chain reaction has been used as a complementary criterion for therapeutic activity in the chronic stage of experimental Chagas disease.

[1791] The following techniques are used to establish reliable criteria for cure in the mouse model of Chagas' disease:

[1792] 1. Fresh blood examination: a drop of blood from the tail is carefully examined in a Neubauer chamber daily or every other day.

[1793] 2. Blood subinoculation: mice are killed about 1 or 2 months after treatment and 0.4-0.6 ml of citrated blood, collected from the severed axillary artery, is inoculated intraperitoneally into susceptible mice. From the 5^{th} day of inoculation, fresh blood examinations are performed daily or every other day for a period of at least 6 weeks.

[1794] 3. Blood culture: blood from treated animals is inoculated into Noeller's culture medium and culture examined for at least 30 days after inoculation.

[1795] 4. Xenodiagnosis: 1 or 2 months after treatment, mice are anesthetized and 4 triatomine nymphae are allowed to feed on them. After 45-50 days, the bugs are carefully examined for trypanosomes

[1796] 5. Histological examination: histological sections of the heart of treated animals are stained with hematoxylin and eosin and examined.

[1797] 6. Re-inoculation: some of the treated animals are reinoculated at different times after treatment with about 4000 blood parasitic forms per gram of body weight; daily counts of trypanosomes are performed so that a new acute phase of the disease can be detected.

[1798] Treated animals show 80-100% cures and prolonged survival associated with elimination or reduction in parasitemia compared to untreated control groups. The differences are statistically significant using the Wilcoxon rank test or other non-parametric or parametric statistics known in the art.

[1799] Antisense Oligonucleotides and IR_{IDA}, ITIM, ITAM or SLAP Gene Knockout to Delete or Inactivate IR_{IDA}s and/or ITIMs, ITAMS or SLAP

[1800] In a representative ex vivo protocol, using the murine TB, Leishmania and trypanosome models described above, an antisense oligonucleotide at a dose of 0.01-1 mg corresponding to the coding region of IR_{IDA} ITIM or SLAP is added to autologous T cells in culture. The uptake of the oligonucleotides by the cells is confirmed using oligonucleotides labeled at the 5′end with fluorescein isothiocyanate (FITC). To check for inactivation of the the IR and ITIMs or SLAP by the oligonucleotides, Western blot quantitation is carried out on the lysed T cells. Expression of the IR_{IDA} genes and their respective ITIM genes is downregulated by >95%.

[1801] In a parallel experiment, T cell are deleted of the gene encoding the IR_{IDA} and their respective ITIM or SLAP by homologous recombination with a mutant gene. The knockout T cells and the antisense-treated T cells are expanded in IL-2 for 24-72 hours, harvested and reinfused into mice with established tuberculosis, leishmaniasis or trypansomiasis. Optionally the T cells are exposed to Lip-IDAs for 24 hours before the addition of IL-2. The animals are sacrificed at the end of the experiment and assayed for residual disease as deseribed above. Results are statistically assessed as given above and show that the adoptively transferred knockout T cells induce greater thann 95% reduction in the number of residual organisms.

[1802] In a representative in vivo experiment, mice are inoculated with organisms. The antisense phosphorothioate oligodeoxynucleotide corresponding to an antisense-sensitive part of the IR_{IDA} genes and of their respective ITIM genes and a control antisense construct (the same nucleeotide composition but with a jumbled sequence) are used.

[1803] A single dose of ITIM or SLAP antisense or control antisense (1 mg per 0.1 ml saline per mouse) or saline (0.1 ml per mouse) is injected s.c. into the right flank of mice once the disease is established in the above models At each indicated time, the animals from the control and antisense-treated groups are killed and residual organisms assayed as described above.

[1804] The uptake of ITIM or SLAP antisense in the tissues is assessed by photoaffinity labelling followed by immunoprecipitation of ITIM or SLAP as follows: The tissues are homogenized with a Teflon/glass homogenizer in ice-cold buffer 10 (Tris-HCl, pH 7.4, 20 mM; NaCl, 100 mM; NP-40, 1%; sodium deoxycholate, 0.5%; MgCl, 5 mM; pepstatin, 0.1 mM; antipain, 0.1 mM; chymostatin, 0.1 mM; leupeptin, 0.2 mM; aprotinin, 0.4 mg ml; and soybean trypsin inhibitor, 0.5 mg ml; filtered through a 0.45-pm pore size membrane), and centrifuged for 5 min in an Eppendorf microfuge at 4° C. The amount of ITIM in organs is determined by photoaffinity labelling with ⁸N-3-[³²P]cAMP followed by immunoprecipitation with anti-ITIM antibodies.

[1805] In a second representative in vivo experiment, IR_{IDA}/ITIM or SLAP knockout mice are prepared by the above methods. They are then inoculated with organisms as above. On day three following injection, the mice are immunized with 0.1-1 mg of Lip-IDAs alone or conjugated to SAgs (see Section 51 and 55) in CFA. If unconjugated Lip-IDA is given, SEB (0.01-0.1 mg) is administered i.p. 2-3 times per week for three weeks. Separate groups of mice are treated with Lip-IDAs or SAgs alone or with CFA or saline or without either Lip-IDAs or SAg respectively. The mice are sacrificed on day 21 and the number of residual organisms assayed as above.

[1806] Alternatively, the antisense oligonucleotides complementatry to IR_{IDA} ITIM or SLAP (0.01-1 mg/mouse) are injected intravenously into mice with established disease. Lip-IDA and SAg or conjugates thereof (Sections 51 and 55) are given on the same schedule as immediately above. Infectious burden is assayed at the end of experiments in both treated and untreated groups as indicated above. Results show >95% reduction in infectious burden in treated animals compared to controls.

### EXAMPLE 54

### Animal Tumor Models: Antisense Oligonucleotides and Gene Knockout Mice and Cells Deleted of Inhibitory Receptors for Lipid-Based Tumor Associated Antigens (IR_{TTA}) and/or Inhibitory Receptors for Superantigens (IR_{SAg}) and/or their ITIMs and/or ITAMs and/or SLAP

[1807] In a representative ex vivo protocol, using the MCA 205/207 murine sarcoma model in C57BL/6 mice (see Examples 15-16), antisense oligonucleotide 0.01-1 mg corresponding to the coding region of IR_{TAA}/IR_{SAg} ITIM or SLAP are added to autologous T cells in tissue culture. The uptake or the oligonucleotides by the cells is confirmed using oligonucleotides labeled at the 5′end with fluorescein isothiocyanate (FITC). To check for inactivation of the the IR and ITIMs or SLAP by the oligonucleotides, Western blot quantitation is carried out on the lysed T cells. The IR_{TAA} and IRSA genes and their respective ITIM genes are downregulated by >95%. In a parallel experiments, T cell are deleted of the gene encoding their IR_{TAA} or IR_{SAg} genes and their respective ITIM SLAP genes by homologous recombination with a mutant gene. The knockout T cells and the anti-sense treated T cells are expanded in IL-2 for 24-72 hours, harvested and reinfused into C57BL/6 mice with established pulmonary metastases as described in Example 16. Optionally the T cells are exposed to lipid-based TAAs or SAg or SAg transfected tumor cells or SAg transfected tumor cell/dendritic cell fusion cells (Example 25-26) for 24 hours before the addition of IL-2. The animals are sacrificed 21 days later and the number of pulmonary metastases counted. Results are statistically assessed as given in Examples 15-16 and show that the adoptively transferred knockout T cells induce a >95% reduction in the number of pulmonary metastases.

[1808] In a representative in vivo experiment, MCA 205/207 tumor cells (1.5×10⁶) are inoculated s.c. into the left flank of C57/B1 mice. The antisense phosphorothioate oligodeoxynucleotide corresponding to the codons for IR_{TAA} and IR_{SAg} genes and their respective ITIM or SLAP genes and control anti-sense (the same base composition as the antisense with the sequence jumbled) are used. A single dose of ITIM or SLAP antisense or control antisense (1 mg per 0.1 ml saline per mouse) or saline (0.1 ml per mouse) are injected s.c. into the right flank of mice when tumour size reached 80-100 mg, 1 week after cell inoculation. Tumor volumes are obtained from daily measurement of the longest and shortest diameters and calculation by the formula, 4/30r³ where r=(length+width)/4. At each indicated time, two animals from the control and antisense-treated groups are killed, and tumours removed, weighed, immediately frozen in liquid N, and kept frozen at −80° C. until used.

[1809] Photoaffinity labelling followed by immunoprecipitation of ITIM is carried out as follows: The tumors are homogenized with a Teflon/glass homogenizer in ice-cold buffer 10 (Tris-HCl, pH 7.4, 20 mM; NaCl, 100 mM; NP-40, 1%; sodium deoxycholate, 0.5%; MgCl, 5 mM; pepstatin, 0.1 mM; antipain, 0.1 mM; chymostatin, 0.1 mM; leupeptin, 0.2 mM; aprotinin, 0.4 mg ml; and soybean trypsin inhibitor, 0.5 mg ml; filtered through a 0.45-pm pore size membrane), and centrifuged for 5 min in an Eppendorf microfuge at 4° C. The supernatants are used as tumour extracts.

[1810] The amount of ITIM or SLAPin tumours is determined by photoaffinity labelling with 8-N3-[³²P]cAMP followed by immunoprecipitation with the ITIM antibodies. In a representative in vivo experiment, IR_{TAA}/ITIM Knockout C57BL/6 mice are prepared by above methods. The MCA 205/207 tumor cells (2-3×10⁵) are then injected intravenously to induce pulmonary metastases. On day three following injection, they are immunized with 0.1-1 mg of Lip-TAAs alone or conjugated to SAgs (Section 51 and 55) in CFA. If unconjugated Lip-TAA is given, SEB (0.01-0.1 mg) is administered i.p. 2-3 times per week for three weeks. Separate groups of mice are treated with Lip-TAAs or SAgs alone or with CFA or saline or without either Lip-TAA or SAg respectively. The mice are sacrificed on day 21 and the number of metastases in the lung are counted as given in Example 16.

[1811] Alternatively, the antisense oligonucleotides complementatry to the IR_{TAA} or IR_{SAg} or ITIM or SLAP coding sequences (0.01-1 mg/mouse) are injected intravenously into C57BL/6 mice with MCA 205/207 tumors present subcutaneously ((at least 1 mm in diameter) or with pulmonary metastases established by injection of 2-3×10⁵ tumor cells intravenously 3 days before. Lipid-based TAA and SAg or conjugates thereof (Sections 51 and 55) are given on the same schedule as immediately above. Tumor size is measured weekly in both treated and untreated groups. The number of pulmonary metastases in the treated and untreated groups is determined as given in Examples 16 and 21. Results are evaluated statistically as given in Examples 16 and 21 and show >95% reduction in tumor size and pulmonary metastases in treated animals compared to controls.

### EXAMPLE 55

### Preparation of Lip-TAAs and Lip-IDAs of Bacterial, Fungal, Yeast, Parasitic, Mycobacterial, Invertebrate or Protozoan Origin

[1812] Isolation and Characterization of Glycosphingolipids: The following are procedures for obtaining purified glycosphingolipid antigens and lipid-based SAg receptors (digalactosylceramides) from biological sources for use in treatment of cancer and infectious diseases. The major membrane bound glycosphinolipids useful for treatment of cancer include the alpha mono-, di- and tri-galacotsylceramides in mammalian cells, phytosphingosines present in yeast, vertebrate and plant cells as the well established array of tumor associated membrane antigen e.g., GD2 neuroblastoma associated antigens. It also includes the vast array of glycosphingolipid antigens associated with infectious diseases as given in Section 54.

[1813] The basis for extraction of glycosphingolipids from biological sources is their solubility in chloroform-methanol mixtures. Gangliosides (glycosphingolipids containing neuraminic acids) and glycosphingolipids with five or more carbohydrate residues are not only soluble in chloroform-methanol mixtures but also form molecular aggregates that are soluble in water. Glycosphingolipids with one to four residues, form emulsions in water which is the basis for the Folch partition (chloroform-methanol (2:1) with one-fifth volume of water or dilute KCl solution) in which gangliosides are partitioned into the upper water-methanol layer and neutral glycosphingolipids remain in the lower chloroform-methanol layer. Most glycosphingolipids are easily extracted from tissue or other material with chloroform-methanol (2:1) but quantitative extraction of gangliosides requires more polar extraction mixtures such as chloroform-methanol (1:1) or chloroform-methanol (1:2). Metal ions also affect the distribution of gangliosides in biphasic systems. Glycosphingolipids are separated from a total lipid extract by silicic acid column chromatography followed by thin-layer chromatography. Ion exchange cellulose (DEAE) column chromatography is used to separate acidic compounds, such as sulfatide and gangliosides, from less acidic or nonpolar compounds.

[1814] Extraction and Partition: All solvents used in the following procedures are redistilled from glass to remove nonvolatile compounds. Chloroform is stabilized by the addition of methanol (after distillation) to a final concentration 0.25% (by volume). Chloroform-methanol and other mixed solvents are given as volume/volume ratios. A weighed portion of the tissue to be extracted is vigorously homogenized with seven volumes of methanol (w/v) in a blender or homogenizer. Fourteen volumes of chloroform are added and the mixture homogenized again. The final solvent ratio is chloroform-methanol (2:1). The material is filtered with a Buchner funnel using an aspirator and a coarse-grade solvent-washed filter paper. The residue is reextracted with 10 volumes (based on weight of the original material) of chloroform-methanol (2:1). After filtration, the residue is extracted a third time with 5 volumes (v/v) of chloroform-methanol (1:1) or chloroform-methanol (1:2). The third extraction is only necessary for quantitative removal of gangliosides. The final combined extract is adjusted by addition of chloroform so that the final proportion is chloroform-methanol (2:1). A volume of 0.1 M KCl equivalent to one-fifth that of the final solvent extract is added, mixed vigorously, and allowed to stand at 4° overnight or until the layers are completely separated. If the volumes are small, the layers are separated by centrifugation. The upper and lower layers are washed three times with theoretical lower and upper phases, respectively, prepared by shaking a mixture of 1 volume of chloroform-methanol (2:1) and 0.2 volume of 0.1M KCl in water and letting the phases separate. With large volumes of combined extracts, the solvents are evaporated in vacuo and the residue redissolved in a convenient volume of chloroform-methanol (2:1) for the partition and washing steps described above.

[1815] The combined lower phases (original and washes) are collected and reduced in vacuo to a small volume with gentle warming (<50°) on a rotary evaporator (fraction I). The combined upper aqueous phases are dialyzed against cold tap water for 24 hours and then lyophilyzed (fraction II). The lyophilyzed material, usually containing some insoluble protein, is extracted with chloroform-methanol-water (10:5:1), filtered and reduced to a small volume on a rotary evaporator. Fraction II generally contains only gangliosides and may be analyzed by thin-layer chromatography without further purification (see below).

[1816] Silicic Acid Column Chromatography: The lipids from the chloroform-methanol layer (fraction I) are fractionated into neutral lipids, glycolipids, and phospholipids on a column of Unisil silicic acid (Clarkson Chemical Co., Williamsport, Pa.). This procedure is useful for glycolipids containing from one to four glycosyl residues and for sulfatides. Inisil (20-40 g per gram of lipid) is activated at 80° for several hours and is slurried with chloroform as quickly as possible after removal from the oven and poured into a column. The adsorbent is washed with about three bed volumes of chloroform or until it is translucent. The column is not allowed to run dry. A 20 mg/ml solution of the sample is applied in chloroform. Neutral lipids are eluted with about five bed volumes of chloroform and then glycosphingolipids are eluted with 8 to 10 bed volumes of acetone-methanol (9:1). Phospholipids are eluted with 5 bed volumes of methanol.

[1817] A different procedure has been used to isolate a particular glycolipid on a preparative scale, as in the purification of trihexosyl ceramide, gal (1→4) gal (1→4) glc-ceramide, from a kidney of a patient with Fabry's disease (trihexosylceramidosis). A crude glycolipid and phospholipid mixture is obtained from fraction I by addition of 200 ml of ether and filtration of the resultant glycolipid-phospholipid precipitate at room temperature. The glycolipid mixture (3 g in one experiment) is then subjected to mild alkali-catalyzed methanolysis. A silicic acid column (400 g) is prepared in chloroform-methanol (19:1), and the sample applied in chloroform-methanol (19:1). The column is eluted successively with 1500 ml each of 12%, 14%, 16%, 20%, 30%, and 50% methanol in chloroform. Fabry trihexosylceramide (1.5 g) is eluted as a pure compound in the 20% fraction. The 16% and 30% fractions also contain some (1 g) of the Fabry lipid mixed with other glycolipids. A similar mixture of glycolipids is fractionated on a silicic acid column using a continuous gradient from 5% to 50% methanol in chloroform.

[1818] Mild Alkali-Catalyzed Methanolysis: The glycolipid fraction from the silicic acid column is treated with mild base to remove contaminating phospholipids. This treatment does not affect glycolipids or gangliosides unless they contain an O-acyl group. The following quantities are used for 1-10 mg of glycolipid fraction. Add 1 ml of chloroform and 1 ml of 0.6 N NaOH in methanol to the dry fraction and allow the mixture to react at room temperature for 1 hour. Then add 1.2 ml of 0.5 N HCl in methanol, 1.7 ml of water, and 3.4 ml of chloroform, mix well, centrifuge, and remove the lower layer containing the glycolipids. Wash the lower layer three times with methanol:water (1:1) and then evaporate it to dryness in vacuo. If a ganglioside fraction is to be methanolyzed, the sample is treated in the same way except that after neutralization with methanolic HCl the sample is dried in vacuo, emulsified in water and dialyzed against tap water at 4° for 24 hours. The nondialyzable material is lyophilyzed and applied to TLC plates as described below.

[1819] Thin-Layer Chromatography: Glycosphingolipids are separated on thin-layer plates of silica gel G, H, or HR. The plates are prepared and activated at 100° C. for 2-4 hours. Plates of 0.25 mm thickness are used for general work and plates of 0.75 mm thickness are used for preparation of large quantities of material. Thin-layer tanks are lined with paper and equilibrated with solvent for 4 or more hours before use. Commercial pre-prepared TLC plates (Quantum Industries, Fairfield, N.J., Brinkman Instruments Inc., Westbury, N.Y., and Analtek Inc., Wilmington, Del.) have been used successfully for qualitative analysis of glycosphingolipids. Separation on these plates, however, is not usually as great as on plates made in the laboratory and contaminants are often obtained when silica gel is removed from pre-prepared plates and eluted with solvents.

[1820] A glycolipid mixture obtained from a column is separated into various components on a silica gel H plate (0.25 mm) using a chloroform-methanol-water (100:42:6) solvent system. Some hematoside, NANA(2-3)gal(1-4)glc-ceramide, is usually partitioned into the lower phase of a Folch wash and is separated from human or porcine globoside, galNAc (1-3)gal(1-4)gal(1-4) glc-ceramide in this system. Monohexosyl ceramide, glc- and gal-ceramide, and dihexosyl ceramide, gal (1→4) glc-ceramide and gal-(1-4) gal-ceramide, often appear as two spots because of the presence of a-hydroxy fatty acids in the ceramide. Otherwise the two forms of monohexosyl and dihexosylceramide are not separated on silica gel alone. Glucosylceramide and galactosylceramide, however, have been resolved on borate-impregnated thin-layer plates. Sulfatide (galactosylceramide sulfate) is not usually completely separated from dihexosylceramide, but these compounds can be completely separated by DEAE chromatography. Gangliosides larger than hematoside remain very near the origin in this system.

[1821] Gangliosides and neutral glycosphingolipids with more than four glycosyl residues are separated by more polar solvent systems such as chloroform-methanol-water (60:45: 10) or chloroform-methanol-2s N NH₄OH (65:45:9). In the latter case, when gangliosides are involved, the plate is developed two times with thorough drying (4 hours at room temperature) between developments. Hematoside is well separated from globoside on silica gel G plates with this system.

[1822] Glycosphingolipids are visualized with iodine vapor or by spraying with a 2% a-naphthol solution (in ethanol) followed by concentrated H₂SO₄ spray and heating for 10 minutes at 100°. The a-naphthol spray gives deep red-purple spots with carbohydrate-containing compounds and brown spots with phospholipids or neutral lipids. As little as 1-10 mg of material is visualized in this way. Gangliosides are specifically visualized by spraying with the following solution: mix 10 ml of 3% resorcinol (stored in refrigerator) with 80 ml of concentrated HCl, 0.25 ml of 0.1 M CuSO₄ and enough water to make 100 ml of solution. The sprayed plate is placed horizontally in a closed jar and heated in an oven at 125° for 20 minutes. Gangliosides appear as black or purple areas and other compounds appear as light brown areas.

[1823] Preparative thin-layer chromatography is carried out by streaking the sample on a 0.75 mm thick plate and developing as outlined above. Only the edges of the streak are visualized with I₂ or a-naphthol and areas containing neutral glycolipids are removed from the plate and the silica gel is eluted with chloroform-methanol-water (100:50:10). Gangliosides are eluted from silica gel with more polar solvents such as chloroform-methanol-water (50:50:15).

[1824] DEAE Column Chromatography: Water-soluble oligoglycosylceramides are separated from gangliosides from fraction II by the following procedure. Diethylaminoethyl cellulose (DEAE) in the acetate form is washed and columns are prepared. The sample is applied in chloroform-methanol (7:3) and neutral glycolipids are eluted with 8 bed volumes each of chloroform-methanol (7:3) and (1:1). Gangliosides are retained on the column and are eluted with 10 bed volumes of chloroform-methanol (2:1) saturated with aqueous 58% NH₄OH.

[1825] Dihexosylceramide and sulfatide isolated from a preparative TLC plate as described earlier is separated on a DEAE column. The sample is applied in chloroform-methanol (9:1) and neutral dihexosylceramide is eluted with 10 bed volumes each of chloroform-methanol (9:1) and chloroform-methanol (7:3). The sulfatide is eluted with chloroform-methanol (4:1) made 10 mM with respect to ammonium acetate, to which is added 20 ml of 28% aqueous ammonia per liter. Sulfate analysis of lipid fractions is carried out.

[1826] Florisil Column Chromatography: An alternative method of isolation of glycosphingolipids is by Florisil column chromatography of the peracetylated glycolipids wherein all the glycophingolipids (except polysialylgangliosides) are isolated in one fraction. Briefly, the procedure consists of peracetylation of the total lipid extract with pyridine-acetic anhydride (3:2) (1 ml per 50 mg of dry total lipid). The pyridine and acetic anhydride are removed in vacuo with additions of toluene, and the products are applied to a Florisil column (40 g per gram of lipid), and neutral lipids and cholesterol are eluted with dichloroethane (8 bed volumes). Peracetylated glycosphingolipids are eluted with 8 bed volumes of dichloroethane-acetone (1:1), and phospholipids are eluted with 5 bed volumes of dichloroethane-methanol-water (2:8:1). Acetyl groups are removed from the glycolipids with 0.25% sodium methoxide in chloroform methanol (1:1) (1 ml per 25 mg of lipid) at 25° for 30 minutes. The mixture is neutralized with acetic acid, emulsified in water and dialyzed overnight at 40 The glycolipid fraction, analyzed by TLC, is free of contaminating phospholipids.

[1827] Characterization of Glycosphingolipids: The first step in the characterization of glycosphingolipids is the complete cleavage of the lipid into its component parts which is carried out by methanolysis with 0.75 N methanolic HCl. The products of methanolysis of a glycosphingolipid ate sphingolipid bases and their O-methyl derivatives, fatty acid methyl esters, and methyl glycosides. These components are separated by solvent extraction and analyzed by gas-liquid chromatography.

[1828] Methanolysis: A solution of a glycosphingolipid (up to 1 mg), isolated from columns or thin-layer chromatography plates, is evaporated to dryness in an 8-ml culture tube fitted with a Teflon-lined cap. Three milliliters of 0.75 N methanolic HCl (prepared by bubbling gaseous HCl into methanol) is added to the sample, and the capped tube is heated at 80° for 12-20 hours. At the end of this period, 0.05-0.3 mmole of mannitol (in methanol) is added as an internal standard. The sample is extracted three times with 1 ml hexane to remove fatty acid methyl esters. The hexane solution of methyl esters is retained for GLC analysis. Approximately 100 mg of solid Ag₂CO₂ is added to each. tube and carefully mixed until neutral. Methyl glycosides of amino sugars and neuraminyl methyl ester, and sphingosines- are N-acetylated by addition of 1 ml of acetic anhydride. The remaining Ag,C03 and AgG1 act as catalyst for this reaction. The mixture is allowed to react for 6-16 hours at room temperature, after which the sample is centrifuged and the precipitate is washed with methanol several times. About 0.25 ml of H₂O is added to decompose excess acetic anhydride, and the sample is evaporated under a stream of nitrogen. If N-acetylation is not performed, the neutralized sample is centrifuged, washed, and evaporated to dryness under nitrogen.

[1829] Trimethylsilylation and Gas-Liquid Chromatography of Methyl Glycosides: Dry samples of methyl glycosides are converted to trimethylsilyl (TMS) derivatives by addition of pyridine-hexamethyldisilazane-tri-methylchlorosilane (8:2:1) (about 50 mM for 500 mg of lipid). The mixture is allowed to stand for 15 minutes at room temperature and an aliquot is injected into the gas-liquid chromatograph. The mixed silane solution is cloudy and is used without centrifugation, but exposure to water vapor is avoided. If very small amounts of sugars are present, the sample is evaporated under nitrogen and redissolved in a convenient solvent such as pyridine or CS₂.

[1830] An aliquot of the solution of TMS derivatives is injected into a gas-liquid chromatographic column (2 m by 3 mm) of 3% SE-30 or OV-1 on Supelcoport (80/100 mesh, Supelco Inc., Bellefonte, Pa.) at 160° with nitrogen carrier gas (25 ml/minute). Programming from 1500 to 2500 at 30 per minute is useful when sialic acids are present. A chromatogram of a methanolyzed sample of globoside, galNAc(1→3)gal (1→4) gal (1→4) glc-ceramide shows three peaks for TMS methyl-D-galactoside (a, g, and b forms); two peaks for methyl-D-glucoside (a and b forms); and two major peaks for methyl-2-acetamido-2-deoxy-D-galactoside. Other methods are useful for gas-liquid chromatography of methyl glycosides are suitable for identification of glycolipids containing fucose, glucose, galactose, galactosamine, glucosamine, and sialic acid. Mannose exhibits peaks overlapping with galactose and if these two sugars are present, the method employing alditol acetates is preferred.

[1831] The ratios of glucose and galactose are determined without conversion factors by simply comparing the ratio of the total peak areas of each methyl glycoside. Since many glycosphingolipids contain only one glucose, ratios are usually expressed in relation to glucose and for globoside the ratio of galactose to glucose is 2. The ratio of galactosamine to glucose calculated in this way is usually about 0.65 for globoside. Methanolysis, N-acetylation, and trimethylsilylation is carried out to obtain reproducible ratios for hexosamines. The mass ratio obtained for N-acetylneuraminic acid to glucose is usually 1.0 to 1.2, and these values should be compared with those obtained from known gangliosides treated in the same way. The absolute quantity of galactose and glucose are determined by comparison to the internal standard mannitol with the use of the following equation.

mmoles glucose=area of glucose peaks/area of mannitol peak×1.25×mmoles of mannitol added

[1832] The mannitol peak falls between the second glucose peak and the first galactosamine peak and does not interfere with either compound. The area of peaks is calculated by triangulation.

[1833] Fatty Acids and Sphingosines: Normal fatty acids and a-hydroxy fatty acids are determined qualitatively and quantitatively by gas-liquid chromatography of the fatty acid methyl esters obtained from the hexane extract of the methanolyzate. Sphingosines are determined by hydrolysis of the glycolipid with aqueous HCl followed by N-acetylation and GLC of the TMS derivatives. A colorimetric assay and a method involving GLC of aldehydes produced by NaIO4 cleavage of sphingosine are also available.

[1834] Enzymatic Degradation of Glycosphingolipids: Specific glycosidases are used for sequence determination and anomeric analysis of glycolipids. Glycosyl residues are released sequentially from globoside (cytolipin R reacts in the same way) by stepwise treatment with the following glycosidases; β-hexosaminidase from jack bean, a-gal actosidase from fig ficin, and β-galactosidase from jack bean. Reactions are carried out with 100 mg of lipid in 0.1 ml of 0.1 M sodium citrate buffer at pH 5, containing 100 mg of crude ox bile sodium taurocholate. After 18 hours at 37°, reaction mixtures are frozen and lyophilized. One milliliter of chloroform-methanol. (2:1) is added and the mixture is sonicated for 5 minutes. After centrifugation, the supernatant fraction is dried, taken up in a small amount of chloroform-methanol (2:1) and spotted on a silica gel HR plate. The plate is developed in chloroform-methanopwater (100:42:6) and visualized with 12 vapors or a-naphthol spray. Products are identified by cochromatography with standards and by elution, methanolysis and GLC analysis.

[1835] Mass Spectrometry of TMS Glycosphingolipids: Mass spectrometry of intact TMS derivatives of glycolipids gives information about the sugar groups, the fatty acid and the sphingosine portion of glycosphingolipids. Bis(trimethylsilyl)trifluoroacetamide (100 ml) and pyridine (50 ml) are added to 20-200 mg of the purified glycosphingolipid in a small capped vial and heated at 60° for about 30 minutes. An aliquot containing 10-20 mg of the TMS glycolipid is evaporated to dryness under nitrogen in a mass spectrometer direct probe tube. The samples are volatilized in the mass spectrometer ion source at temperatures ranging from 10° to 180° depending on the size of the oligosaccharide unit. The following information can be obtained by comparison of the resulting mass spectra with those of reference samples: (1) whether the terminal residue is a hexose or hexosamine; (2) the number of and nature of —N-acetylneuraminic acid groups (i.e., terminal or branched); (3) whether N-acetyl and/or N-glycolylneuraminate is present; (4) information regarding the number of glycosyl residues present and the fatty acid and sphingosine composition. Because of the the inability to distinguish between hexoses, this technique in conjunction with other techniques, such as permethylation analyses, and studies with specific glycosidases.

[1836] Ozonolysis of Glycosphingolipids: The carbohydrate portion of glycosphingolipids is cleaved from the lipid portion. The glucose-sphingosine linkage is broken but there is no hydrolysis of other glycosidic linkages, including those of sialic acid residues. The glycolipid (100 mg) is ozonized in 50 ml of methanol at room temperature. Ozone consumption is monitored by bubbling the effluent gas through a KI-starch solution which blackens when excess ozone is present. The solution is dried in vacuo and the compound is hydrolyzed with 10 ml of 0.2 M Na₂CO₂, for 12 hours at 20°. Sodium ion is removed by stirring with Dowex 50 (H+) and the resin is filtered. After a Foich partition, the upper aqueous phase is lyophilized and the resultant oligosaccharides (about 80% yield) are stored in a desiccator. The procedure is changed for microscale operation (1 mg of lipid).

[1837] Permethylation of Glycosphingolipids: Permethylation, hydrolysis, and gas-liquid chromatography of glycosphingolipids is used to determine linkage of glycosyl residues. Permethylation is carried out using methyl sulfinyl carbanion. Sodium hydride (0.88 g of 57% in oil) is washed six times under nitrogen with dry hexane, drained thoroughly, and stirred with dimethyl sulfoxide (10 ml) under a stream of nitrogen at 70° for 3 hours or until bubbling ceases and the solution turns a dark clear green. Any dark precipitate is removed at this point by centrifugation. The carbanion solution (about 0.5 ml) is added under a stream of nitrogen to the glycolipid sample in 0.5 ml of dimethyl sulfoxide, and the mixture is sonicated briefly. After standing at room temperature for 2-6 hours, 1.5 ml of CH3I is added dropwise under nitrogen, and the mixture is allowed to react for 1 hour. After this step, it is not necessary to keep the reaction dry. The permethylated glycolipids are extracted into chloroform, the chloroform layer is washed once with 1% Na2S3O3 to remove I₂, and four times with water. The chloroform fraction is mixed with absolute ethanol and is evaporated under nitrogen. Two milliliters of 1 N H2S04 is added, and after heating at 105° for 12 hours the hydrolyzate is neutralized with BaCO₃ diluted, and filtered on Celite and filter paper, washing the Celite twice with water (5 ml). The sample is concentrated to 5 ml and percolated onto a small Dowex 50 H+ column. Neutral sugars are eluted with water and methanol-water (1:3) (10 ml each) and amino sugars are eluted with 0.3 N NH4OH. The resulting partially methylated sugars are reduced with NaBH4, the products are acetylated and gas-liquid chromatography is carried out.

[1838] Partial Hydrolysis of Glycosphingolipids: The presence of N-acetylneuraminic acid or N-glycolylneuraminic acid in a ganglioside sample is determined by mild acid hydrolysis of the neuraminic acid followed by TLC or GLO analysis. The N-acylneuraminic acids are released from gangliosides (0.1-0.2 mg) with 1 ml of 0.05 M HCl (aqueous HCl) at 80° for 1 hour. The solution is extracted with chloroform and the aqueous phase is percolated through about 2 g of Dowex 1 (acetate form) in a small column. The column is washed with 8 ml of water, and the neuraminic acids are eluted with 10 ml of 1 M formic acid. The sample is analyzed on silica gel C plates using n-propanol-water-concentrated ammonia (6:2:1). The Rf of N-acetylneuraminic acid is 0.41 and that of N-glycolylneuraminic acid is 0.28. This sample is also be derivatized with bis (trimethylsilyl) trifloroacetamide and analyzed by GLC.

[1839] Neuraminic acids are usually analyzed by GLC as their TMS-methyl ketoside methyl ester derivatives. A ganglioside sample (0.1 mg) or mixture of glycolipids is methanolyzed with 2 ml of 0.05 M methanolic HCl (1 part 12 N HCl and 240 parts methanol) at 80° for 1 hour. The cooled solution is extracted three times with 3 ml hexane and the methanolic layer is evaporated to dryness under nitrogen. Pyridine-hexamethyldisilazane-trimethylchlorosilane (8:4:2) (50 ml) is added and the TMS derivatives are analyzed on a 3% OV-1 column (2 m×2 mm) at 205°. The sulfate moiety of sulfatide (up to 2 mg) is released by reaction with 2 ml of 0.05 N methanolic HCl for 4 hours at room temperature. The reaction mixture is neutralized with aqueous NaOH and the glycolipid product is extracted by Folch partition with 4 ml of chloroform. The chloroform layer is washed with 2 ml of methanol-water (1:1) and is analyzed by TLC.

[1840] The carbohydrate sequence of glycosphingolipids is determined by partial degradation under mild acidic conditions. The glycolipid (1 mg) is hydrolyzed with 1 ml of 0.3 N HCl in chloroform-methanol (2:1) at 60° for various times up to 2 hours. After Folch partition (with addition of 0.2 volume of water) the lower phase is dried in vacuo and the upper phase is deionized with Amberlite CG-4B resin (OH form). The glycolipids (from lower phase) are purified by TLC and analyzed by GLC after complete hydrolysis. The upper phase is analyzed for sugars (and polysaccharides) by GLC. Trihexosyl ceramide, gal(1→4)gal (1→4)glc ceramide, hydrolyzed for 2 hours in this way did not yield ceramide but yielded cerebroside containing only glucose, and a dihexosyl ceramide containing glucose and galactose in a 1:1 molar ratio. The water-soluble fraction contained galactose and a disaccharide but no glucose. These data provide evidence for a linear arrangement of the hexose units as given above.

[1841] Characterization of the oligosaccharide moieties of glycolipids by partial degradation is also been carried out by treatment of glycolipids with 0.1 N aqueous HCl for 30 minutes to 3 hours, and by treatment of gangliosides with 0.01 N H₂SO₄ at 85° for 1 hour and 0.1 N H₂SO₄ at 100° for 1 hour.”

[1842] Mixed Molecular Species of Glycosphingolipids: The purification and characterization of glycosphingolipids is complicated by the fact that naturally occurring glycosphingolipids which are homogeneous in the carbohydrate portion are heterogeneous in the sphingosine and fatty acid portions. Complete hydrolysis and subsequent analyses of the fatty acids and long-chain bases provide information about the extent of this heterogeneity. Additional heterogeneity results when there are glycosphingolipids with identical composition but which differ in glycosidic linkage and/or anomeric configuration of one or more glycosidic bonds. Such mixtures probably cannot be separated by TLC alone. Whether or not products which are homogeneous by TLC actually contain such mixtures can only be determined with techniques such as permethylation and sequential enzymatic degradation.

[1843] Extraction of Inositolphosphorylceramides (InsPCers) of Fungi and Yeast: Extraction of InsPCers from Saccharomyces cerevisiae and from the mycelial phase of Neurospora crassa is as follows: Cells uniformly labeled with [³H]inositol are used to gauge the extraction efficiency of a variety of procedures. Treat the cells with 5% trichloroacetic acid at 0C to destroy phospholipases, known to be activated by organic solvents during lipid extraction, followed by extraction with a slightly alkaline, warm, water-rich mixture of ethanol-diethylether-water-pyridine. This method approached 100% extraction of the labeled inositol; Some water-poor solvents completely failed to extract the InsPCers. The adopted procedure has been used for InsPCer extraction from other fungi such as Histoplasma capsulatum and from fresh tobacco leaves and has been used for the extraction of lipophosphoglycan from Leishmania donovani. In the absence of labeling of InsPCer components, efficacy of InsPCer extraction could be judged by monitoring total long-chain base and/or very-long-chain fatty acids.

[1844] Purification of InsPCers: Purification of INsPCers is no different from any very polar, acidic lipid. First, InsPCers precipitate almost quantitatively at low temperature after adjusting to pH 5 the initial lipid extracts from S. cerevisiae, H. capsulatum, N. crassa, and tobacco leaves. Second, mild alkaline methanolysis is used to destroy the ester-containing lipids in crude or semipurified extracts; however, stronger alkaline conditions should be avoided owing to the lability of unsubstituted inositol attached by a phosphodiester bond. Finally, liquid chromatography on silica gel columns is used for isolating InsPCers; low levels of salt in the eluting solvents are required to chromatograph macroscopic quantities of the very polar InsPCers. A solvent polar enough to dissolve a practical amount of the very polar InsPCers yields insufficient retention. Inclusion of salt increases the retention presumably by providing a charged surface for the negatively charged InsPCers. In contrast, the salt had little influence on the retention of neutral lipids.

[1845] Extraction and Purification of Galactosylceramides--Cell culture: Human kidney cells (PT cells) are prepared as described previously (Chatteree et al., Proc. Natl. Acad. Sci. (1983)). Human cadaver kidneys (post mortem <12 hr) are used for the isolation of PT cells. Glucosylceramide was prepared from the spleen of a Gaucher's patient. Digalactosyklceramide is prepared from the kidney of a Fabry's patient. Other GSLs are purchased from Sigma. Normal rat kidney cells were purchased from the American Tissue Culture Collection (Rockville, Md.). Cells (×10⁴) are seeded in 24 well trays and grown for 6 days in medium containing 10% fetal calf serutn (Hyclone, Utah).

[1846] Lipid Extraction and Fractionation of GSL from Human Kidney: Total lipids are extracted from freeze-dried cultured PT cells or human kidney cortex or both by vigorous homogenization and extraction with hot (50° C.) chloroform:methanol 2:1 (v/v)10 ml/mg protein. The lipid extracts are filtered on a sintered disc tunnel and the non-lipid residue is extracted further with hot chloroform-methanol 1:2 (v/v) containing 5% H20. Lipid extraction is pursued at 50° C. for 30 min with constant stirring. The lipid extract is filtered on a sintered glass funnel and the residue is extracted further, first with hot chloroform:methanol:water 1:2, 5%) and then with methanol. The lipid extracts are pooled and dried by flash evaporation. Water-soluble contaminants are removed from the lipid extracts.

[1847] Isolation and Purification of GSL: The lower phase lipid fraction obtained following Folch partitioning of human kidney total lipids is fractionated into neutral lipid, GSL and phospholipids by silicic acid chromatography as described previously (Chatterjee et al., 1982). The acetone:methanol fraction containing GSL is subjected to alkaline methanolysis, neutralized and dried under a nitrogen atmosphere. The dried residues are solubilized in chloroform:methanol 2:1 (vlv) and subjected to HPTLC on Silica gel HPTLC plates with chloroform:methanol:water (65:25:4, v/v) as the developing solvent. The individual GSLs are identified with aniline diphenylamine (OPA) reagent or iodine vapours. The chromatogram is calibrated with authentic GSL standards of known structure. The total GSL fraction was precipitated with ether and subjected to mild alkali-catalysed methanolysis, dialyzed against water and separated by silicic acid chromatography. The silicic acid column is equilibrated with chloroform:methanol (19:1) and a sample suspended in the same solvent is applied on the column bed. The column is eluted successively with 12, 14, 16, 20, 30 and 50% methanol in chloroform, and the fractions are dried in a nitrogen atmosphere. The various fractions are analysed for the composition of GSLs. Several of the fractions obtained when the column is eluted with 14% methanol in chloroform contained digalactosylceramide. Such preparations of digalactosylceramide are further characterized by high-performance liquid chromatography (HPLC) and are utilized for binding to SEB.

[1848] Quantitation of GSL: GSLs are quantified by HPLC, after perbenzoylation. An aliquot of perbenzoylated GSL sample is suspended in hexane and subjected to HPLC on a Spherisorb Si-5 column with detection at 230 nm. The amount of GSL is calculated by using a standard curve for the respective GSLs.

[1849] Characterization of Galactosylceramides: Acid hydrolysis of GSLs are carried out followed by TLC of sugars on aluminium-backed silica gel 60 (without indicator) HPTLC plates with the use of 2-propanol-1% sodium borate (3:1, v/v) as the developing solvent. The sugars are localized by spraying the plate with 10% H2S04 in 50% ethanol and heating at 150° C. for 10 min in an incubator. Anomeric linkage of the purified GSL receptor is determined using β-galactosidase, α-galactosidase and β-glucosidase An aliquot of the purified GSL receptor is incubated with or without β-galactosidase; β-galactosidase and β-glucosidase in 0.05 M citrate buffer (pH 5.4) containing taurodeoxycholate for 18 h at 37° C. The reaction is terminated with chloroform:methanol (2:1 vlv) and the lower-chloroform layer is subjected to HPTLC. The plate is developed with aniline DPA reagent.

[1850] GC-MS of GSL: Suitable aliquots of the putative SEB receptor are subjected to acid-catalysed methanolysis (Esselman et at., 1972). The methyl sugars, methyl fatty acids and methyl sphingosines are purified by solvent extraction as described above. They were dried in a nitrogen atmosphere and derivatized by employing trimethylchlorosilane reagent. The derivatized samples (fatty acid methyl esters) suspended in hexane were injected into a Varian-3400 gas chromatograph (DB-wax capillary column, 30 m; J and W Company, California) that is attached to a mass spectrometer ITD-850, Finnigan Ion Trap detector. Helium is used as a carrier gas. Temperature programming from 160° C. to 250° C. at 1° C./min is employed to separate the various fatty acid methyl esters. The TMSi sugars are separated on a DB-5 column using temperature programming from 160° C. to 250° C. at 1° C./min. Data analysis of TMSi sugars is pursued by the use of a Compaq deskpro-2862 computer. Suitable aliquots of the GSL are subjected to microscale permethylation. The gas chromatography column (DB-5 capillary column 0.25 mm×30 m) is calibrated with authentic standards of mixtures of partially methylated alditol acetates (Biocarb. Chemicals, Sweden). Temperature programming is from 160° C. to 250° C. at 1° C./min and from 250° C. to 350° C. at 2° C./min.

### EXAMPLE 56

### Transfection of Thymidine Kinase Gene into Activated Immunocytes

[1851] In order that the immunocytes with deleted or inactivated IRs do not undergo unlimited proliferation in vivo it is necessary to provide a method for eliminating these cells after they have performed their tumoricidal function in vivo. To achieve this effect, a retrovirus-mediated transfer of a gene encoding a ‘prodrug’, a reagent that confers sensitivity to cell killing following subsequent administration of a suitable drug is used. Thymidine kinase (Wigler M et al., Cell, 11: 223 (1977); Colbere-Garapin F et al., Proc. Natl. Acad. Sci., 76: 3755 (1979)) is encoded by the cellular, HSV, or vaccinia virus tk genes and the HSV-tk gene is used as a prodrug gene. The HSV-tk gene is transfected into immunocytes by methods given in Example 1. The HSV-tk confers sensitivity to the drug gancyclovir by phosphorylating it within the cell to form gancyclovir monophosphate which is subsequently converted by cellular kinases to gancyclovir triphosphate. This compound inhibits DNA polymerase and causes cell death. The immunocytes are administered to the host. Unopposed proliferation of immunocytes cells deleted of IR_{TAA}s, IRS_{SAg}s, IR_{IDA}s in response to tumor associated lipid-based antigens may lead to immunocyte excess. Therefore, after the immunocytes have performed their tumor killing in vivo, gancyclovir is administered in conventional pharmacologic doses which induces apoptosis of HSV-tk transfected immunocytes.

### EXAMPLE 57

### Deletion of Immunocyte and Antigen Presenting Cell LipTAA Receptors in Tumor Bearing Hosts

[1852] Lip-TAA receptors are deleted or inactivated in T Cells, NKT Cells and NK Cells in vivo and in vitro using but not limited to anti-sense oligonucleotides gene knockouts Examples 51-52. Immunocytes and accessory cells used for adoptive transfer are depleted of their TGG receptors using antisense and gene knockout technology as given in Examples 51-52. The T Cells, NKT Cells and NK Cells (collectively immunocytes) and accessory or antigen presenting cells including but not limited to macrophages, dendritic cells, fibroblasts, B cells and with deleted or inactivated TGG receptors are therefore protected from ganglioside-induced immune suppression and are capable of inducing an anti-tumor response.

[1853] Model Tumor Systems for Testing Efficacy of Immunocytes Deleted of Lip-TAA: Receptors: Tumor models used for determining efficacy of ganglioside receptor deletion or inhibition on immunocytes and accessory cells are given in Examples 20-23.

[1854] The deletion or inhibition of ganglioside receptors on immunocytes or accessory cells in tumor bearing hosts is carried out in vivo. Alternatively, the deletion or inhibition of ganglioside receptors on immunocytes or accessory cells can be achieved ex vivo and the treated cells used for adoptive immunotherapy. Outcomes are given in Examples 21, 23.

[1855] General Procedures for Ex Vivo Sensitization of Immunocytes Depleted of Lip-TAA Receptors to Produce Tumor Specific Effector Cells for Adoptive Immunotherapy

[1856] MCA 205/207 tumor cells, A/20 lymphoma cells, FBL-3, a Friend virus-induced erythroleukemia of B6 origin, is (provided by Dr. Philip Greenberg) and Lewis lung carcinoma cells are used. Tumor growth is initiated by subcutaneous inoculation of mice on both flanks with 1.5×10⁶ tumor cells suspended in 0.05 ml of HBSS. After 9-12 days of tumor growth (approximately 8 mm in diameter), tumor-draining inguinal LN are removed sterilely. Lymphocyte suspensions are prepared by teasing LN with needles followed by pressing with the blunt end of a 10-mi plastic syringe in HBSS. Tumor draining LN cells delpleted of ganglioside receptors are stimulated in vitro in a two-step procedure. Briefly, 4×10⁶ LN cells in 2ml of complete medium (CM) containing the superantigens are incubated in a well of 24-well plates at 37° C. in a 5% C0₂ atmosphere for 2 days. CM consisted of RPMI 1640 medium supplemented with 10% heat-inactivated FCS, 0.1 mM nonessential amino acids, 1 mM sodium pyruvate, 2 mM freshly prepared L-glutamine. 100 ug/ml streptomycin, 100 U/ml penicillin, a 50 mg/ml gentamycin, 0.55 mg/ml fungizone (all from GIBCO, GrandIsland, N.Y.) and 5×10⁻⁵ M 2-mercaptoethanol (Sigma). The cells are harvested, then washed and further cultured a 3×10⁵/well in 2 ml of CM with IL-2. After 3-day incubation in IL-2, the cells are collected and counted to determine the degree of proliferation. Finally, the cells are suspended in appropriate media for flow cytometric analysis, evaluation of cytotoxicity and lymphokine secretion, or for adoptive immunotherapy.

[1857] General Adoptive Immunotherapy Protocol: Mice are injected with 2 to 3×10⁵ syngeneic MCA 205 or 207 fibrosarcaoma tumor cells suspended in 1 ml of HBSS to initiate pulmonary metastases. This is the preferred animal model for evaluation of the adoptively transferred effector cells (Shu S. a at, .I. Immunol. 152: 1277-1288 (1994)). Other models of tumor metastases are induced by injection of:

[1858] (a) with 2×10⁶ B16 or FBL-3 (erythroleukemia) cells in the spleen to induce liver metastasis,

[1859] (b) intravenously with 3×10⁵ B16 or 2×10⁶ LLC (Lewis lung carcinoma) cells for pulmonary metastases or;

[1860] (c) subcutaneously with 2×10⁶ B 16 cells (melanoma) for subcutaneous tumor growth on day 0.

[1861] On day 3, ganglioside receptor depleted immunocytes or accessory cells are given i.v. at numbers indicated generally 10⁶-10⁸ into syngeneic hosts. In some instances, mice are also treated with 15,000 U IL2 in 0.5 ml HBSS twice daily for 4 consecutive days to promote the in vivo function and survival of the activated cells. On day 20 or 21, all mice are randomized, killed and metastatic tumor nodules enumerated. If pulmonary metastases exceeds 250, this number is arbitrarily assigned for statistical analysis. The significance of differences in metastases numbers between experimental group is determined by the Wilcoxon rank sum test. Two sided p values of <0.1 are considered significant. Each experimental group consists of at least five mice and no animal is excluded from the statistical evaluation.

### EXAMPLE 58

[1862] The Lip-TAAs expressed and shed by tumor cells are isolated and tested for capacity to bind to various lipid binding proteins and to inhibit mitogen induced T cell proliferation. The best binding agent for use in vivo as a decoy to bind Lip-TAAs and prevent their uptake by APCs of T cell is selected from among the Siglecs, prosaposins, saposins, glycolipid transfer proteins (GLTP), non-specific lipid transfer agents and other ganglioside binding proteins. Monoclonal antibodies specific for Lip-TAAs are also useful as Lip-TAA binding agents. They are particularly useful when it is determined that immunosuppressive Lip-TAAs share a common antigenic domain. The natural Lip-TAA binding agents are preferred because of their broad specificity and unlike monoclonal antibodies do not require preparation of a new agent for each variant immunosuppressive ganglioside identified.

[1863] Extraction of gangliosides from tumors.: Gangliosides are purified from pools of human tumors and/or serum lipoprotein fractions as previously described. Briefly, tumor tissue is homogenized in chloroform/methanol 1/1 (v/v) and extracted twice in the same solvent. After evaporation the lipid residue is dissolved in chloroform/methanol 2/1, filtered and dried to remove most peptidic contaminants. After two cycles, total gangliosides are purified by three successive partitions in chloroform/methanol/phosphate-buffered saline pH 7.40, 1/1/0.7 (v/v/v) and desalting by reverse-phase chromatography on C 18-bonded silica gel. In the case of serum or serum fractions, the procedure is essentially the same but contained only one extraction. Purity of the preparation was controlled by thin-layer chromatography (TLC) on silica gel 60 HPTLC plates (Merck. Paris. France) using a solvent system made of chloroform/methanol/0.2% aqueous CaCl₂. 60/35/8 (v/v/v). Staining is performed with resorcinol HCl. Lipid-bound sialic acid is assayed by the penodate/resorcinol method. The relative proportion of each ganglioside is estimated after resorcinol/HCl by scanning densitometry of the TLC plates on a Shimadzu CS-930 Chromatoscan set at 580 nm.

[1864] Preparation of lipoproteiin fractions: Lipoprotein fractions are prepared from human AB sera by sequential centrifugations. The lipoprotein is fractionated by density-gradient ultracentrifugation in sodium bromide. Sera are first centrifuged at 10,000 g for 20 minutes to remove chylomicrons. Very-low-density lipoprotein (VLDL), low density lipoprotein (LDL) and high-density lipoprotein (HDL) are floated at respective densities of 1.006. 1.073 and 1.220 g/ml. LDL HDL and the lipoprotein-free fraction (LFF) are extensively dialyzed against phosphate buffer before use to remove sodium bromide and resuspended in phosphate buffered saline in the original volume of serum from which they are extracted. Total serum and the serum lipoprotein fractions are at a final concentration of 10% (v/v).

[1865] Inhibition of peripheral blood mononuclear cell (PBMC) proliferation: PBMC are obtained from the blood of normal donors by Ficoll/Hypaque centrifugation and are washed in medium without serum (RPMI-1640. Gibco, with 1 mM glutamine and penicillin/streptomycin). The culture medium consists of medium without serum, or medium supplemented (10% v/v) with one of the following: total human AB serum, VLDL, LDL, HDL or LFF. Samples containing 1×10⁵ cells are incubated in a final volume of 200 μl (96-well plates, Beckton-Dickinson. Le Pont de Claix. France) in the presence or absence of total tumor gangliosides and one of the following mitogens: phytohemagglutinin (PHA, 1 μg/m; Sigma. St Louis, Mo.), OKT3 monoclonal antibody (100 ng/ml; Coulter) concanavalin A (0.5 μg/ml; Sigma), interleukin-2 (IL-2. 1000 UI/ml, Roche, France) or 12-O-tetradecanoylphorbol 13-acetate (10 ng/ml: Sigma). After 72 h of incubation, proliferation is assayed by the incorporation of [³H]thymidine (0.5 mCi/well, specific activity 1 mCi/nmol=37 GBq/mmol; C.E.A., Gif-sur-Yvette, France) after an 18-h pulse.

[1866] Screening of Lip-TAAs for Binding to Lip-TAA Binding Proteins: The extracellular domains of Siglecs or other LipTAA binding agents, e.g., glycolipid transfer proteins (GLTP), prosaposins are cloned into a FLAG-human Fc expression vector (pEDdc). COS-7 cells are transiently transfected at 60-70% confluency using LipofectAMINE Reagent (Life Technologies), in serum-free OptiMEM medium. After 5 h the medium is diluted 2 times with 10% fetal calf serum containing OptiMEM medium and the next day the medium is changed for OptiMEM with 2% fetal calf serum. The COS-7 cell supernatants are collected 5-7 days after transfection. The fusion protein is purified on Protein A-Sepharose. Microtiter wells (Nunc) are coated overnight at 4° C. with Protein A (200 ng/well) in 50 mM carbonate/bicarbonate buffer, pH 9.5. Wells are blocked with enzyme-linked immunosorbent assay buffer (20 mM HEPES, 1% bovine serum albumin, 125 mM NaCl, 1 mM EDTA, pH 7.45) for 1 h and incubated with various lipid binding agents (500 ng/well) for 2 h. Between incubations (all at room temperature) wells are washed 3 times with enzyme-linked immunosorbent assay buffer. Lip-TAAs and circulating lipoprotein-bound TAAs are isolated and frationated from tumors and tumor bearing sera as described in Example 59 and below in this section. They are are added for 2 h at various concentrations ranging from 100 ng to 2 μg/well. The plates are washed and biotin-conjugated polyacrylamide substituted with the natural substrates for the individual lipid binding agent are added. In the case of Siglec 5 this is Neu5Acα2-6Gal/β-4G1c, Neu5Acα2-3Galβ1-4G1c, Neu5Acα2-6GalNAcα(sialyl-Tn), and GalNAcα(Tn) (Glycotech). The plates are washed then incubated with alkaline phosphatase-conjugated streptavidin (Life Technologies; 1:1000) for 1 h and development with 100 pl/well of p-nitrophenyl phosphate Liquid Substrate System (Sigma). Plates are read-out at 405 nm. Competitive inhibition of binding of the Lip-TAA relative to the natural substate for each lipid binding agent is recorded. Concomitantly, the Lip-TAAs and circulating lipoprotein fractions are tested for their capacity to inhibit mitogen induced T cell proliferation using the methods given below.

[1867] Preparation of Siglecs from cDNAs: Siglecs 1-7 are isolated by standard recombinant techniques using cDNA for each siglec. cDNAs for the Siglecs are obtained starting with their full length amino acid sequences as given in GenBank. Accession numbers for each Siglec is given below. The first 120 amino acid sequences of mouse Siglec-1 (GenBank accession #Z36293) and human Siglecs 266 (X59350, 4502654, M29273, 4502658, and 4502656, respectively) are used to carry out homology searches of the dbEST division of GenBank database.

[1868] cDNA of Myelin Associated Glycoprotein, Sialoadhesin, CD22 & CD33: Myclin associated glycoprotein (MAG, Siglec 4a) cDNA has been cloned as described by by Arquint M et al., Proc. Natl. Acad. Sci. 84: 600-604 (1987). Sialoadhesin (Siglec 1) cDNA has been cloned by methods given in Crocker P R et al., EMBO J 13: 4490-4503 (1994). The cDNA for the sialoadhesin p75/ARM1 has been cloned (Falco M et al., J. Exp. Med. 190: 793-801 (1999). The cloning of cDNA of CD22 uses methodolgy of Stamenlovic I et al., Nature 345: 74-77 (1990) and Wilson G L et al., J. Exp. Med. 173:137-146 (1991).

[1869] CD33 has been cloned (Cornish A L et al., Blood 92: 2123-2132 (1998). cDNA cloning in the human and mouse shows that CD33 is a type I transmembrane glycoprotein with two Ig-like extracellular domains. These domains belong to the V-set and C2-set of Ig-like domains and share sequence similarity with a distinctive subgroup of the Ig superfamily. This consists of the myelin-associated glycoprotein (MAG), the Schwann cell myelin protein, the B-cell antigen CD22, and the macrophage receptor sialoadhesin. All of these Ig-related proteins contain an unusual arrangement of conserved cysteine residues at the NH2 terminus. These are predicted to give rise to an intrasheet disulfide bridge within the V-like domain and an interdomain disulfide bridge between the V- and C2-like domains. In addition, MAG, CD33, and CD22 are closely linked within the genome, mapping within the region of chromosome 19q13.1-13.3 in the human and a syntenic region on chromosome 7 of the mouse

[1870] cDNA of Siglec-5: By using the amino acid sequence of CD33, a specific homology search was performed against a database containing more than one million expression sequence tags (ESTs) obtained from over 700 different cDNA libraries. A full-length clone in pBluescript II (SK1 encoding one of the CD33-like sequences identified in the search was isolated from a human activated monocyte library and designated pHMQCD 14. A computer search of nucleotide and protein sequence was performed by using the Blast GeneSearch (National Center for Biotechnology Information, National Institutes of Health. Bethesda, Md.). Manipulation of sequences and alignments were performed by using Baylor College of Medicine molecular biology software available on the internet (Human Genome Center, Baylor College of Medicine, Houston, Tex.).

[1871] Preparation of recombinant Siglec-5: The extracellular region of siglec-5 is amplified by polymerase chain reaction (PCR) with the following forward and reverse primers (5′-3′): ACTCTAGAGTTCGATCTCCCTTGCAGCAG and ACAGATCTGTTCGATCTCCCTTGCAGCAG. The PCR product is cloned in-frame into the pIGplus vector, which encodes a Factor Xa cleavage site between the extracellular region and the hinge region of the Fc portion of human IgGI. Plasmids encoding other Fc-proteins are prepared. To generate recombinant proteins, plasmids are transfected into COS-1 cells by diethylaminoethyl-dextran (DEAE) transfection and Fc-proteins are purified from the conditioned supernatants. Briefly, supernatant is passed over a protein-A Sepharose column, and the bound protein is eluted with 0.1 mol/L glycine pH 3.0 followed by neutralization with 10% vol/vol 1.0 moL/L Tris pH 8.0. The proteins are dialyzed against 20 mmol/L Tris pH 8.0, and the concentrations are estimated by using the bicinchoninic acid (BCA) assay kit (Pierce, Rockford, Ill.) with bovine semm albumin (BSA) as a standard. Fc-proteins are shown to be greater than 95% pure. by sodium dodecyl sulfate-polyacrylamide gel electrophoresis (SDS-PAGE) analysis.

[1872] cDNA of Siglec 6 (OB-BP1 and OB-BP2): A TF-1 cDNA library is constructed with oligo(dT) priming and cloned into the EcoRI/NotI sites of the retroviral vector pBabe-X-puro, in which the multiple cloning site from pBabe-X are substituted for that of pBabe-puro. The library is packaged in B05C23 cells and then introduced into Ba/F3 cells by retroviral infection. For expression cloning, three rounds of sorting are necessary to isolate a homogenous population positive for rhOB-F staining. Geonmic DNA is extracted from the third sort of the Ba/F3 cells using the Easy DNA kit (Invitrogen). Polymerase chain reaction is performed with Vent polymerase (New England Biolabs) using nested primers designed from the retroviral vector. Another related molecule was cloned from the TF-1 library in pBabe-X-puro by colony hybridization using the OB-BP1 cDNA as a probe. After the initial submission of these sequences to GenBank other reports indicated that OB-BP1 (GenBank accession number U71382) is identical to GDSSL (GenBank accession number D86358) and OB-BP2 (GenBank accession number U71383) is identical to Siglec-5

[1873] cDNA of Siglec-7: Since the clone lacked a coding sequence for the first half of an Ig-like domain, 5′-RACE and RT-PCR are performed, using human PBMC total mRNA as a template (PBMC are chosen based on preliminary Northern analysis using the partial clone). RT-PCR is performed using primers based on the DNA sequence of the EST clone and 5′ RACE product. First strand cDNA is synthesized by reverse transcription of I μg of PBMC total RNA with random DNA hexamers as primer. The reaction product is subjected to two rounds of PCR using two DNA polymerase (Roche), using SLX-5′UTR (5′-CTCG-GATCCCTGGCACCTCTAACCC-3′) and SLX-3′UTR (5′-GGTCTAGAACCCTCAAACAAGCCC-3′) as primers. The PCR products are digested with BamHI and XbaI ligated to BamHI-XbaI sites of pBluescript II KS(−) (Stratagene) and sequenced. A point mutation converting an Arg residue (R124) to Lys is introduced using QuickChange Site-Directed Mutagenesis Kit (Stratagene), following the manufacturer's protocol. A human 12-lane Multiple Tissue Northern Blot is probed with the NcoI-XhoI fragment of the EST clone labeled with the Strip-EZ DNA kit (Ambion) and [α-³²]dATP (NEN). Hybridization signals are visualized using a Phosphor Imager.

[1874] The full-length clone contains an open reading frame encoding 374 amino acids, starting with a typical signal sequence and two Ig-like domains, followed by a probable transmembrane domain and cytosolic tail. The cytosolic tail of the full-length protein contains two tyrosine residues, of which the first is contained in an Immunoreceptor Tyrosine-based Inhibitory Motif (ITIM; S/I/L/VxYxxL/V). The second is in a motif [NEYSBI] similar, but not identical to the binding site on SLAM (Signaling Lymphocyte Activating Molecule) for SLAM-associated protein (SAP). Nucleotide identity with other human Siglecs (first 750 nucleotides) are: Siglec-1, 45.9%; Siglec-2, 48.0%; Siglec-3, 63.6%; Siglec-4, 45.4%; Siglec-5, 64.0%; Siglec-6, 63.0% and many of the residues typical of the Siglecs are conserved. Siglec-7 forms a closely related cluster with Siglecs 3, 5, and 6.

[1875] Prosaposin & Saposin: Purification Procedure: Purified prosaposin and saposins are prepared from their respective cDNAs (O'Brian et al Science) using standard recombinant techniques.

[1876] Prosaposin is purified from the spent media of Spodopterafrugiperda (Sf9) cells infected with a baculovirus expression vector (pAC 610) containing a full-length cDNA for human prosaposin as described by Hiraiwa M et al., FASEB J. 6: 969 (1990). Purification steps included column chromatography on Con A-Sepharose and reverse-phase HPLC on a C4 column. The purity of the final purified preparation is assessed by SDS/PAGE, immunoblotting, and N-terminal analysis. Naturally occurring prosaposin is also isolated by the same method from human seminal plasma

[1877] Saposins A, C, and D are all isolated in pure form from the spleen of a patient with Gaucher disease as described by Morimoto S et al., Anal. Biochem 190:154-157 (1990). Saposin B is purified from a heat-treated extract of Gaucher disease spleen by a slightly modified procedure involving reverse-phase HPLC on a C4 column and isoelectric focusing with the Rotofor cell. Each purified protein gives a single band on SDS/PAGE, and no cross-contamination of one saposin with another is detected after immunoblotting using monospecific antibodies against saposins A, B, C, and D, respectively.

[1878] Glycolipid Transfer Protein (GLTP): Purification Procedure: Purified GLTP is isolated and prepared from GLTP cDNA (GTP cDNA) by the method of Lin et al., J. Biol. Chem. 275:5104-5110 (2000) using standard recombinant techniques.

[1879] The method of Sasaki T et al., Methods in Enzymology 179: 559-567 (1989) is used to purify GLTP to homogeneity with a yield of 19%. The data presented derive from the processing of 3,950 g of pig brain (44 brains).

[1880] Step 1: Postmitochondrial Supernatant. Fresh pig brains are stored at −20°; thin blocks after removal of pia mater. Frozen brains (4,000 g) are partly thawed by allowing to stand at 20° for 1 hr and then cut in small pieces, after which all manipulations are performed at, 4°, A 30% homogenate in buffer A is prepared by homogenizing with a Waring blendor for 1.5 mm at high speed. The mixture is centrifuged at 8,700 g for 30 mm. The pellet is reextracted by stirring with 10 liters of buffer A. Phenylmethylsulfonyl fluoride (PMSF), 0.2 M in 2-propanol, is added to the postmitochondrial supernatant to a final concentration of 0.5 mM.

[1881] Step 2: Ammonium Sulfate Precipitation. Ammonium sulfate is added to the postmitochondrial supernatant to 35% saturation (19.4 g/100 ml). After stirring for 1 hr, the precipitate is removed by centrifugation at 8,700 g for 40 mm. The supernatant is adjusted to 70% saturation with ammonium sulfate (21.8 g/100 ml) to precipitate GLTP. After allowing to stand overnight, the clear supernatant above the thick precipitate is siphoned off by the use of a tube. The precipitate is collected by centrifugation (8,700 g for 30 mm), dissolved in 200 ml of buffer C, divided into three dialysis bags (4 cm flat diameter), and dialyzed for 2 days against 7 times 4 liters of buffer C. After addition of PMSF to 0.5 mM the dialysate is centrifuged at 100,000 g for 2 hr to obtain a membrane-free solution.

[1882] Step 3: First Phosphocellulose Chromatography. The supematant is diluted to 670 ml with buffer C and applied to a column (7×25 cm) of phosphocellulose (Whatman P11) in buffer C at a flow rate of 100 ml/hr. Unbound protein is eluted by rinsing the column with 5 liters of buffer C. The transfer activity is eluted with 2 liters of 0.3 M sodium chloride in buffer C. PMSF is added to the effluent at 0.5 mM.

[1883] Step 4: Chromatography on CM-Cellulose. Protein is precipitated from the effluent with ammonium sulfate added to 90% saturation (60.3 g/100 ml), left overnight, and collected by centrifugation at 33,000 g for 10 mm. The pellets are dissolved in 90 ml of buffer C and dialyzed against 4 times 1 liter of buffer C. The dialysate is centrifuged at 100,000 g for 30 mm to remove a small amount of insoluble material. The supernatant is applied to a column (2.7 )<45 cm) of CM-cellulose (Whatman CM-52 microgranular) equilibrated with buffer C. The column is rinsed with 1.4 liter of buffer C to elute unbound protein. The elution is continued with a 1.6-liter linear gradient of sodium chloride from 0 to 0.2 M in buffer C at a flow rate of 37 ml/hr. Fractions of 17 ml each are collected, and 50-ul aliquots are assayed. A major peak of transfer activity appears in the effluent at about 55 mM sodium chloride, but some transfer activity is eluted before the main peak. Fractions of the major activity peak with an activity of 0.14 nmol of [³H]galactosylceramide transferred/50 ul/30 mm are pooled, and PMSF is added to 0.5 mM.

[1884] Step 5: Fractionation on Sephadex G75: Protein is precipitated from the pooled fractions with ammonium sulfate (65 g/t00 ml), left overnight, and collected by centrifugation at 25,000 g for 15 mm. The pellets are dissolved in 7 ml of buffer B and dialyzed against 5 times 300 ml of this buffer. The dialysate is centrifuged at 100,000 g for 90 mm, and the supernatant is applied to a column (2×140 cm) of Sephadex G-75 (fine, Pharmacia). Protein is eluted with buffer B at a flow rate of 39 ml/hr. Fractions of 4 ml each are collected, and IS-₄ul aliquots are assayed. Transfer activity appears at VJ V₃=1.84. Fractions with an activity of 0.17 nmol of [³H]galactosylceramide transferred/15 ul/30 mm are pooled.

[1885] Step 6: Chromatography on Phenyl-Sepharose. Sodium chloride is added to the pooled fractions to 3 M, which is then applied at a flow rate of 48 ml/hr to a column (2×19 cm) of Phenyl-Sepharose CL-4B (Pharmacia) equilibrated with buffer E containing 3 M sodium chloride. The column is rinsed with 220 ml of buffer E containing 3 M sodium chloride and 775 ml of buffer E. The transfer activity is eluted with 250 ml of 50% (v/v) ethylene glycol in buffer E. Fractions of 4.3 ml each are collected, and 2-ul aliquots are assayed. Fractions with an activity of 0.03 nmol of [³H]galactosylceramide transferred/2 ul/30 mm are pooled. Extensive washing of the column with buffer E elutes a portion of the transfer activity. Therefore, it is important to determine the proper time to switch from buffer E to 50% (v/v) ethylene glycol in buffer E.

[1886] Step 7: Second Phosphocellulose Chromatography The pooled fractions are diluted 2-fold with buffer D and then applied to a column (1.4×15 cm) of phosphocellulose (Whatman P11), which has been extensively washed and equilibrated with buffer D. The column is rinsed with 180 ml of buffer D. The elution is continued with a 200-ml linear gradient of sodium chloride from 0 to 0.2 M in buffer D at a flow rate of 20 ml/hr. Fractions of 3.4 ml each are collected, and 2-ul aliquots are assayed. Most of the transfer activity and protein are eluted in a single peak at about 93 mM sodium chloride. GLTP in this peak is homogeneous and has a specific activity of 40.6 nmol/min/mg protein under the conditions of [³H]galactosylceramide transfer assay and of 140 nmol/min/mg protein under the conditions of PyrGalCer transfer assay. A small amount of the transfer activity is eluted as a separate peak after the elution of the major peak. The purity of GLTP in the second peak varies depending on the extent of rinsing with buffer E in Step 6. No difference has been found in the properties of GLTP in the first and second peaks.

[1887] In vivo Use of Lip-TAA Binding Proteins.: Tumor models given in Examples 18, 20-23 are used. Lip-TAA receptor mimic and Lip-TAA receptor antisense constructs are injected in doses of 0.05 to 50 μg in 0.1-0.5 ml of normal saline on days 3, 5, 7, and 9 after the day of subcutaneous tumor implantation or intravenous injection of tumor to establish pulmonary metastases. Control animals are injected with PBS on the same schedule. The diameters of tumors are measured daily with calipers. The sizes of the tumor are expressed as the products of the longest diameter times the shortest diameter (in mm²).On day 21, the mice are killed and either primary tumors measured or metastatic pulmonary nodules counted. Unless indicated otherwise above, treatments are given one to three times per week. The results shown in Example 21 (Table VI) are for each composition and dose tested. The results are statistically significant by the Wilcoxon rank sum test. The other models given in Example 20 are also suitable for evaluation of the therapeutic effectiveness of the effector T cells.

[1888] Adoptive Therapy of Tumors in Humans Using Lip-TAA Receptor Depleted Immunocytes or Antigen Presenting Cells.

[1889] Eligible patients are treated with tumor antigens such as irradiated tumor cells or GM-CSF transduced tumor cells injected approximately 10 centimeters from a draining lymph node site. Ten days post injection, draining lymph nodes are obtained in a limited surgical procedure at the site draining the injection. The lymph nodes are converted to a single cell suspension of lymphocytes. These lymphocytes are depleted of ganglioside receptors by methods given above. They are then incubated with various SAg preparations for two days followed by IL-2 for an additional 72 hours. These lymphocytes now called effector T cells or NKT cell are used for adoptive immunotherapy. Effector immunocytes are harvested by centrifugation at 500×g for 15 mm and the cell pellets are pooled. After washing the cells in HBSS, the cell are resuspended in 200 ml of normal saline containing 5% human serum albumin and 450,000 IU of IL-2 for transfer. Each recipient will receives four escalating doses or 33 million, 100 million, 330 million and 1 billion cells per square meter of body surface area each given one week apart. Cells are infused through a subclavian central venous catheter over a 30-minute interval. IL-2 administration iv. is optional and if used is generally commenced shortly after completion of cell infusion at a dose and schedule of 180,000 IU/ml every 8 h. for 5 days. All patients receive indomethacin (50 mg P.O.) every 8 h, acetaminophen (650 mg P.O.) every 6 h. and ranitidine (150 mg P.O.) every 12 h while receiving IL-2 in order to reduce febrile and gastric side effects. As controls, a cohort of patients is treated with the in vivo tumor vaccination step and IL-2 without the tumor effector cells. Patients are followed for clinical response every 4 weeks for 2 months with repeat radiological examinations. Results are given in Example 23 (Table VIII).

### EXAMPLE 59

[1890] Preparation and Use of Lip-TAA Receptor Mimics for Inactivation of Lip-TAAs in Tumor Bearing Hosts

[1891] Lip-TAA Isolation: The cellular gangliosides are isolated from FBL-3 tumor cells which are pelleted lyophilized and extracted twice with chloroform-methanol (1:1). The total lipid extract was taken to dryness. Gangliosides are purified by partitioning the dried total lipids in diisopropylether/1-butanol/0.1% aqueous NaCl. The lyophilized final aqueous phase is dissolved in a small volume of water, after which Sephadex G-50 gel exclusion chromatography is used to remove salt and low m.w. impurities from the ganglioside fraction. Gangliosides are quantified as nanomols of lipid-bound sialic acid by a modified colorimetric resorcinol assay. Analysis of gangliosides is performed using 10-×20-cm precoated Silica Gel 60 high performance TLC plates. The plates are developed in chloroform-methanol. 0.25% aqueous CaCl₂—H,O (60:40:9). Gangliosides are visualized as purple bands with resorcinol-HCl.

[1892] High performance liquid chromatographic purification of Lip-TAA: Lip-TAAs are purified by normal phase HPLC. Briefly, 800 nmol lipid-bound sialic acid (LBSA) of FBL-3 cell gangliosides in 100 μl HPLC water are chromatographed with a Perkin-Elmer (Norwalk. Conn.) HPLC system, on a LiChrosorb-NH₂ column (250 mm long, 10 mm inside diameter, Merck, Germany). The separation is conducted at ambient temperature with a solvent gradient program described by Gazzotti et al. (27). The eluting solvent system is composed of acetonitrile-5 mM Sorensen's phosphate buffer (83:17), pH 5.6 (solvent A), and acetonitrile-20 mM Sorensen's phosphate buffer (1:1), pH 5.6 (solvent B). The gradient elution program of 80 mm, at a flow rate of 6.25 ml/mm, is as follows: 100% of solvent A for 7 mm, then a linear gradient from 100% solvent A to solvent A-solvent B (66:34) over 53 mm, and then a linear gradient from solvent A-solvent B (66:34) to solvent A-solvent B (36:64) over 20 mm. The elution profile is monitored by flow-through detection of UV absorbance at 215 nm. The isolated gangliosides are lyophilized, dissolved in a small volume of distilled water, desalted by Sephadex G-50 gel exclusion chromatography, and lyophilized.

[1893] Mass spectrometric analysis: The carbohydrate structure of TGGs is characterized by negative-ion fast atom bombardment mass spectrometry (FAB-MS). Ceramide structures are elucidated by negative ion FAB collisionally activated dissociation tandem MS (FAB CAD-MSIMS) without prior derivatization using linked scans. Approximately 1 μl of ganglioside-methanol solution is mixed with 2 μl of triethanolamine (matrix) on the FAB probe tip. Ions are formed by bombardment with a 6-keV beam of xenon atoms in a JEOL HX-110 double-focusing mass spectrometer. For analysis of the ceramide structure by FAB CAD-MS/MS the [cerO]⁻ fragment ion is selected as the precursor ion. Helium is used as the collision gas, and the helium pressure is adjusted to reduce the abundance of the precursor by 75%. A JEOL DA-500 data system generated the linked scans.

[1894] Lip-TAA Shedding: FBL-3 tumor cells are metabolically labeled by culture for 48 h in RPMI 1640 medium containing 10 MCi each of D-[1-¹⁴C]glucosamine hydrochloride and D-[1-¹⁴C]galactose, after which the cells are washed three times in RPMI medium and resuspended at 2.0×10⁶ cells/ml in three 25-cm² tissue culture flasks. The supernatant and the cells from the same flask are harvested 24 h after the cells are resuspended. The gangliosides present in the cells and in the supematant are then purified. The radiolabeled gangliosides are quantified by p-scintillation counting of the ganglioside-associated radioactivity, and equal aliquots of radiolabeled gangliosides are qualitatively analyzed by high performance TLC (HPTLC) autoradiography (29) with radiolabeled rat brain gangliosides as standards.

### EXAMPLE 60

### Construction of Adenovirus Vectors with Insertions for Superantigens

[1895] Superantigens are inserted into human adenoviruses (Ads) which are used as live viral vector for expression of superantigens in mammalian cells. Adenoviruses vectors are exemplified here for insertion of the superantigen nucleotide. A mutant adenovirus with selectivity for P53 deficient tumors is preferred such as ONYX-015. An efficient and flexible system for construction of adenoviral vector with insertions or deletions in early regions 1 and 3 as described by Bett A J et al., Proc. Natl. Acad. Sci. 91: 8802-8806 (1994) is given below. Similar procedures insertion of the superantigen gene would be applied to the ONYX-014 mutant.

[1896] Principle of Method: Superantigen genes are inserted into adenoviral vectors using the following principles and methods adapted from Bett, A J et al., Proc. Nat. Acad. Sci. 91: 8802-8806 (1994). Additional methods are given in a book titled Adenovirus Methods and Protocols Wold, WSM ed. Humana Press, Totowa, N.J. (1999) which is incorporated in entirety by reference. These methods involve insertion of the superantigen DNA either by overlap recombination or by ligation insertion. The method exemplified below for insertion of SAg sequences uses the Ad5DNA virus but may be adapted to the dl1150 or ONYX-015 mutant or any other adenovirus. The Ad5 DNA sequences are cloned into into bacterial plasmids. Deletions are made in the early region 1 and(3180 bp) and early region 3 (2690 or 3132 bp) and are combined in a single vector that have a capacity for inserts of up to 8.3 kb, enough to accommodate the majority of cDNAs encding proteins with regulatory elements. SAg genes are inserted into either early region 1 or 3 or both and mutations or deletions are readily introduced into the viral genome.

[1897] SAg genes may be inserted into areas of the viral genome that have been inactivated or deleted and considered to be non-essential to the lytic activity of the virus or its ability to evade the host immune response. Both Ad and HSV carry genes that are not essential for viral replication and these may be utilized for SAg insertion.

[1898] The first step is the construction of AdBHG, a virus that contains the Ad5 genome with the deletion of E3 sequences from bp 28,133 to 30,818 and the insertion of a restriction enzyme site. The next step is the the generation of a bacterial plasmid containing the entire AdBHG genome and subsequent identification of infectious clones. Baby rat kidney (BRK) cells are infected with AdBHG under conditions that result in the generation of circular Ad5 genomes. At 48 h after infection, DNA is extracted from the infected BRk cells and used to transform E. coli HMS174 to ampicillin and tetracycline resistance. Plasmids with the complete AdBHG genome are selected. The final step is the generation of the pBHG10 by deleting the packaging signals in pBHG9 by partial BamHI digestion and religation. A Pac I restriction enayme site unique to this plasmid is present between Ad5 bp 28,133 and bp 30,818 to permit foreign gene insertion. Because the packaging signal is deleted, pBHG10 is non-infectious but cotransfections with plasmids that contain the left-end Ad5 sequences including the packaging signal produce infectious viral vectors with an efficiency comparable to that obtained with pJM17.

[1899] Use of the pBHGE3, pBHG10, or pBHG11 combined with the 3.2-kb deletion in E1 permits superantigen DNA inserts of ˜5.2,˜7.9, and ˜8.3. respecitvely, into viral vectors. To test the capacity of the BHG system, a 7.8 kb consisting of the lacZ gene driven by the HCM promoter (E1-antiparallel orientation) and the SEB gene driven by the beta actin promoter (E1-parallel orientation) are inserted into the 3.2-kb E1 deletion. The 7.8-kb insert is constructed by inserting the 4.1-kb Xba I fragment from the SEB gene containing the SEB gene driven by the beta actin promoter into the Xba I site in pHCMVsp1LacZ generating pHlacSEB. The isolate pHlacSEB expressed both lacZ and SEB at levels comparable to those obtained with vectors containing single inserts.

[1900] The Method: The first step involves the construction of AdBHG, a virus that contains the Ad5 genome with the deletion of E3 sequences from bp 28,133 to 30,818 and the insertion of modified pBR322 at bp 1339. AdBHG is made by cotransfection of 293 cells with purified viral DNA from Ad5PacI, digested with Cia I and Xba I, and pWH3.

[1901] The next step involves the generation of a bacterial plasmid containing the entire AdBHG genome and subsequent identification of infectious clones. Baby rat kidney (BRK) cells are infected with AdBHG under conditions that result in the generation of circular Ad5 genomes. At 48 h after infection DNA is extracted from the infected BRK cells and used to transform E. coli HMS 174 to ampicillin and tetracycline resistance (Apr and Tetr, respectively). From two experiments, plasmid DNA from a total of 104 colonies is screened by HindIII and BamHI/Sma I digestion and gel electrophoresis. Plasmids that appear to posses a complete AdBHG genome are selected and all four are found to be infectious when transfected into 293 cells.

[1902] The final step involves generation of pBHG10 by deleting the packaging signals in pBHG9 by partial BamHI digestion and religation. The left and right termini of the Ad5 genomes are covalently joined and a segment of plasmid pBR322 is present between AdS bp 188 and 1339 to allow propagation of pBHG10 in E. coli. A Pac I restriction enzyme site, unique in this plasmid, is present between AdS bp 28,133 and bp 30,818 to permit insertion of the superantigen genes. Because the packaging signal is deleted, pBHG10 is noninfectious but cotransfections with plasmids that contain the left-end AdS sequences including the packaging signal produce infectious viral vectors with an efficiency comparable to that obtained with pJM17.

[1903] To generate two useful variants, pBHGE3 and pBHG11 are constructed from the original plasmid pBHG10. pBHGE3 permits construction of vectors with wt E3 sequences and pBHG11 increase the cloning capacity of resulting viral vectors. The 2.69-kb E3 deletion in pBHG10 removes the major portions of all E3 mRNAs, the first E3 3′ splice acceptor site, and the L4 polyadenylylation site but leaves the E3 promoter, the 5′ initiation site, the first E3 5′ splice donor site, and the E3b polyadenylylation site intact. Viruses with the 2.69-kb E3 deletion have the same growth kinetics and progeny virus yields as wt virus. The 3.1-kb E3 deletion in pBHG11 removes two additional elements not removed by the 2.69-kb E3 deletion: the first E3 5′ splice donor site and the E3b polyadenylylation site. This deletion does not interfere with the open reading frame for pVIII or any of the L5 family of mRNAs. Viruses containing the 3.1-kb deletion give wt progeny yields in infected 293 cells.

[1904] To maximize the capacity of the BHG system and to facilitate the introduction of inserts such as the SEB gene into the E1 region, plasmids containing a 3.2-kb deletion of E1 sequences and multiple restriction sites for the insertion of foreign genes have been constructed. This deletion leaves intact the left ITR and packaging signals and extends just past the Spi binding site of the protein IX promoter. The promoter for transcription of the protein IX gene is relatively simple, consisting of this Spi binding site and a TATA box. The Spi binding site is essential for expression of protein IX and it is therefore, reintroduced at a position 1 bp closer to the TATA box than in the wt promoter. However, neither the original 3.2-kb E1 deletion nor the deletion mutants containing the synthetic Spi site are significantly altered in protein IX expression, heat stability or final progeny yields of viruses with this deletion.

[1905] General Treatment Plan for Patients with the SAg-dl1150 Construct: SAg-dl1150 is administered intratumorally to patients with recurrent and refractory cancers. The efficacy of SAg-dl1150 treatment is based on the injected tumor(s) response. The clinical benefit of SAg-dl1150 is evaluated through quality-of-life assessment (EORTC instrument), Karnofsky performance score, and pain assessment. Survival and progression-free survival intervals are recorded. Results are given in Example 23 (Table VIII).

[1906] SAg-dl1150 Dosages and Dosing Rationale: Patients are treated with SAg-dl1150 administered daily for 5 d at a dose of 10¹⁰ pfu per day. This is the highest dose administered daily for 5 d in the phase I study and was shown to be safe (i.e., no dose-limiting toxicities).

[1907] Treatment with SAg-dl1150:

[1908] a. Dosing Regimen: For administration of each dose of, patients are treated and observed in a properly equipped outpatient clinic. The target tumor is injected with 10¹⁰ PFU of SAg-dl1150 daily over 5 d (i.e., a total dose 5×10¹⁰ PFU) (with day 1 being the first day of SAg-dl1150 injection. Nontarget tumor(s) (where applicable) are injected with either diluent or SAg-dl1150 on the same days in identical fashion to the target tumor following the guidelines detailed in steps below.

[1909] b. Target Tumor Masses: The dominant, symptom-causing tumor (if symptoms are present) is identified as the target tumor and is the only tumor injected with SAg-dl1150 during the first two treatment cycles. The identification of the most symptomatic, problematic lesion is based on the judgement of the Principal Investigator. Multinodular, but contiguous tumors are treated and evaluated as a single lesion.

[1910] c. Secondary, Nontarget Tumor Masses: If additional, smaller, accessible lesions are present, these lesions are injected with diluent for the first two treatment cycles as described in step 3 below. Thereafter, treatments are divided between up to three separate lesions (i.e., the initial two cycles are concentrated within the dominant lesion; thereafter, 6 wk after treatment initiation, two additional secondary lesions are injected). However, the total dose to the patient remains the same (i.e., the same total dose will be divided up between the tumors to be treated); the total volume in which the SAg-dl1150 is suspended will be increased based on the total tumor volume of the tumors to be treated. If a CR occurs in a treated lesion, injections can be continued as outlined above with newly defined dominant and secondary lesions.

[1911] d. Immediate Posttreatment Monitoring of Patients: The patient's vital signs are taken ≦15 mm before each SAg-dl1150 injection. After each injection is completed, the patient will be observed in the clinic for a minimum of 30 mm. Vital signs are taken after 30 min ±5 mm. If vital sign(s) have changed by >15%, vital signs will be repeated every 30 mm until returning to within baseline 15% of baseline values. Following the observation period, the patient is sent home or hospitalized overnight at the discretion of the investigator. Results are given in Example 23 (Table VIII).

[1912] Plasmid Superantigen-HPV E7 Constructs.: The method of Chen CII et al., Cancer Res. 60 1035-1042 (2000) is used. A DNA fragment encoding SEB is prepared as described in Example 1 and Dow S W et al., J. Clin. Invest. 101: 2406-1414 (1998). Briefly, the genes for SEA and SEB and the pHBNeo beta actin promoter which are to be inserted into the BHG system at multiple restriction sites are described in Example 1 Additionally the SEB and SEA genes are obtained from Dr. John Kappler (National Jewish Hospital), and the gene for TSST-1 are obtained from Dr. Brian Kotzin (National Jewish Hospital). After PCR amplification, all three genes are subcloned into a eukaryotic expression vector (PCR3; Invitrogen Corp., San Diego, Calif.). The primers used for cloning SEA were

(forward):
GGGAATTCCATGGAGAGTCAACCAG;
(backward):
GCAAGCTTAACTTGTTAATAG;
for SEB (forward):
GGGAATTCCATGGAGAAAAGCG;
(backward):
GCGGATCCTCACTTTTTCTTTG;
for TSST-1 (forward):
CGGGGTACCCCGAAGGAGGAAAAAAAAATGTCTACAAACGAT
AAT ATAAAG;
(backward):
TGCTCTAGAGCATTAATTAATTTCTGCTTCTATAGTTTTTAT.

[1913] The full-length TSST-1 gene is cloned into PCR3, whereas only the mature SEB and SEA genes (minus the putative bacterial signal sequences) are cloned into PCR3. Removal of the SEB and SEA signal sequences increased the level of gene expression in transfected cells (data not shown). The plasmids are grown in E. coli and plasmid DNA used for recombination in the adenoviral constructs are extracted by modified alkaline lysis-method and purified on a CsCl gradient. For the generation of SEB-expressing plasmid, (pcDNA-SEB) the SEB was subcloned into the unique BamHI and HinIII cloning sites of the pcDNA3.1(−) expression vector (Invitogen, Carlsbad, Calif.) downstream of the cytomegalovirus promoter. For the generation of HPV-16 E7-expressing plasmid (pcDNA3-E7), E7 DNA is amplified by PCR using primers designed to generate BamHI and HindIII restriction sites as the 5′ and 3′ ends of the amplified fragments, respectively. The amplified E7 DNA is then cloned into the unique BamHI and HindIII cloning sites of the pcDNA3.1. For the generation of E7-SEB chimera (pcDNA-E7-SEB), E7 DNA is amplified by PCR using primers designed to generate BamHI restriction sites at both 5′ and 3′ ends of the amplified fragments. The E7 DNA is then subcloned to the 5′ end of pcDNA3-SEB. The accuracy of these constructs is confinned by DNA sequencing. Plasmid DNA with SEB, E7, or E7-SEB gene insert and the “empty” plasmid vector are transfected into subcloning efficient DH5 (TM cells; Life Technologies). The DNA is then amplified and purified using double cesium chloride purification (BioServe Biotechnologies. Laurel, Md.). The integrity of plasmid DNA and the absence of Escherichia coli DNA or RNA are checked in each preparation using 1% agarose gel electrophoresis. DNA concentration os determined by the absorbance measured at 260 run. The presence of the inserted E7 fragment is confirmed by restriction enzyme digestion and gel electrophoresis.

[1914] DNA Vaccination.: Gene gun particle-mediated DNA vaccination is performed using a helium-driven gene gun (Bio-Rad. Hercules, Calif.) according to the protocol provided by the manufacturer. Briefly, DNA-coated gold particles were prepared by combining 25 mg of 1.6˜m of gold microcartiers (Bio-Rad, Hercules, Calif.) and 100 M¹ of 0.05 Ni spermidine (Sigma, St, Louis, Mo.). Need to house this chimeric plasmid construct in a viral vector which can transport the chimeric DNA into tumor cells for transport selectively to tumor cells.

[1915] Generation of Dendritic Cells Exposed to Necrotic Tumor Cells Transfected with: Ag Genes: DCs are generated from blood monocyte precursors as follows. Briefly, mononuclear cells are plated in 6-well culture plates at 8×10⁶ cells per well and allowed to adhere to plastic for 2 hours. Plastic adherent cells are cultured in RPMI-1640 (BioWhittaker, Walkersville, Md., USA) supplemented with 1% autologous plasma, 20 μg/ml gentamicin (clinical grade; Fujisawa USA, Deerfield, Ill., USA), 800 U/mL GMP grade IL-4 (Cell Genix, Freiburg, Germany), and 100 IU/mL clinical grade GM-CSF (Immunex, Seatde, Wash., USA) for 7 days. Cultures are supplemented with cytokines on days 2,4, and 6. On day 7, cells are transferred to new plates and cultured in the presence of 50% (vol/vol) monocyte-conditioned medium (MCM) for 2 additional days. Using this methodology, 1.5×10⁶ to 4×10⁶ mature DCs expressing high levels of CD86, CD83, and HLA-DR, and lacking other lineage markers (e.g., CD 14), are reproducibly generated from 80 ml of peripheral blood. MCM is prepared by adhering 50×10⁶ PBMCs in 7 ml of 1% autologous plasma to plates precoated with 100 μg/mL human IgG (Bayer Corp., Elkhart, Ind., USA) for 90 minutes. The PBMCs are harvested after overnight culture of adherent cells and are filtered and frozen at −20° C. before use. Mature DCs generated using this methodology are potent stimulators in mixed lymphocyte reaction at T/DC ratios of 900:1.

[1916] Injection of SAg-Tumor Antigen Pulsed Dendritic Cells: Antigens are added to DCs overnight 1 day before injection. On the day of injection (i.e., day 9 or 10 of culture), the DCs are washed free of antigen and resuspended in normal saline containing 0.5% autologous plasma in two 0.2 ml aliquots. Phenotype and purity of injected DCs are monitored by the expression of the DC maturation-associated marker CD83 by flow cytometty. DCs are injected as a superficial subcutaneous injection in 2 adjacent sites on the upper inner arm, ˜4 inches from the axilla. All injected DC preparations test negative for bacterial and fungal contamination. All subjects are observed overnight. Results are given in Example 23 (Table VIII).

[1917] Viral Vector Containing Superantigen and IκBα Nucleic Acids.: The super-repressor IκBα and superantigen nucleotides are cloned into the replication-deficient Ad5 vector with transgene expression driven by the CMV pormoter. The replication deficient Ad.CMV3 containing the superantigen and super-repressor IκBα is used ot produce stably transfected HT10801 cells. The cells are pre-infected with Ad.CMV IκBα; or Ad.CMV3 empty control vector for 1 h.

[1918] In vivo tumor model with Ad.CMV IκBα and TNF treatment.: HT1 0801 cells (10⁶ cells/0.1 ml) or control HT1080V cell suspensions are injected subcutaneously into each flank of female, athymic, nu/nu mice 5-6 weeks old (Taconic, Germantown, N.Y.). Tumors are allowed to develop for 21 d and then were injected with TNFα; (10 μg/100 μl in PBS once a day for 3 d). Both maximum and minimum diameters of resulting tumor are measured over the skin every 2 days using a slide caliper. Tumor cells (10⁶) were injected subcutaneously in the flanks of nu/nu, female, athymic nude mice 5-6 weeks old (body weight, 18-20 g). Tumors are treated 2-3 weeks after cancer cells are injected when tumor dimensions were approximately 1 cm×1 cm. Tumor treatment involved the intratumoral injection of recombinant adenovirus Ad.CMV Iκ Bα. Virus (10¹⁰ PFU, diluted in a total of 200 ul of PBS) is administered in a single pass of a 27-gauge hypodermic needle. A second virus injection was given 7 d after the first. The recombinant adenovirus Ad.CMV3 and vehicle alone are used as controls. CPT-11 (Irinotecan; Pharmacia & Upjohn Company, Kalamazoo, Mich.) was administered by tail vein injection at a dose of 33 mg/kg in 100 ul every 4 d beginning 24 h after the first viral injection. A total of five doses of CPT-11 are given. PBS (100 ul) administered by tail vein injection was used as a control for drug treatment. Tumor diameter is measured along the longest orthogonal axes every other day after treatment was initiated, and recorded as tumor volume. Tumor volume is calculated by assuming a spherical shape, using the formula (volume=4/3 πr²), where r=1/2 (mean tumor diameter measured in two dimensions). Tumors are fixed in 10% formalin and embedded in paraffin blocks. Paraffin-embedded sections are pre-treated with dewax and rehydrated (55° C. for 15 mm), then washed in xylene and rehydrated through a graded series of ethanol and redistilled water. Tissue sections were then incubated with proteinase K (20 μg/μl in 10 mM Tris/HCl, pH 7.4-8.0, for 15 mm at 21-37° C.), permeabilized in 0.1% Triton-X100 in 0.1% sodium citrate, and then labeled with the TUNEL reaction mixture (Boehringer). Results are given in Example 21 (Table VI).

[1919] Therapeutic Model: The therapeutic efficacy of SAg-dl1520 construct is determined in vivo by growing p53-C33A cells and p53+U87 human glioblastoma multiforme cells as tumor xenografts in athymic mice. The tumor cells are injected subcutaneously into each flank of each mouse, and after establishment of palpable tumors (mean tumor volume 150 μl), the tumors are directly injected with CsCl-purified wild-type adenovirus, with SAg-dl1520. dl1520 or ultraviolet (UV)-inactivated wild-type virus as a negative control every other day for three total doses. Tumor growth is followed for 6 weeks, at which time the mean tumor volume in each group are determined. Treatment of C33A tumors with superantigen-dl1520 results in a 100% reduction in mean tumor volume as compared with dl1520 cells or wild type UV inactivated adenovirus (unpaired two tailed test: P=0.02). In contrast, dl1520-injected p53+ U87 tumors are comparable in size to control-injected tumors after 6 weeks, although shrinkage is seen in some cases.

[1920] Construction of plasmids encoding SAg self replicating RNA (pRep-SA): pRep-SAg is constructed by replacing the LacZ fragment in pRep-LacZ with SAg fragment from the plasmid PHBNeo-SEB or by using the plasmids developed by Dow as in the above section on viral DNA. pRep^{del}-LacZ is created by cleavage of the Rep-LacZ plasmid with XhoI and BgIII (creating a 1407-bp deletion) which was then end-filled and self-ligated.

[1921] The plasmid SFV3-LacZ contains a SP6 promoter, a 7-kb fragment encoding the SFV RNA replicase, and a subgenomic promoter that is bound by the RNA replicase to synthesize large quantity of subgenomic RNA. The LacZ gene is located in the 5′ region of the subgenomic promoter. The plasmid pRep-LacZ is constructed by inserting an SphI fragment containing the CMV immediate early promoter/enhancer into the SphI site of SFV3-LacZ (Life Technologies). The CMV promoter/enhancer fragment is inserted so that the resulting plasmid could potentially be used for DNA immunization studies similar to those reported. An additional SpeI site is inserted 5′ of the 5P6 promoter together with the CMV promoter/enhancer fragment. Digestion of the plasmid with SpeI generates a DNA fragment that contains only the SFV RNA replicase and β-gal coding sequences without sequences encoding ampicillin-resistant p-lactamase, which is used as the template for in vitro transcription of Rep-LacZ RNA. The primers used for generating a PCR fragment containing the CMV promoter/enhancer from pCR3.1 plasmid (Invitrogen, Carlsbad, Calif.) are: 5′ primer, 5′-ACATGCATGCACTAGTGCGCGCGTTGACATTGATTA-3′ (SpeI site (underlined) added for subsequent linearization) and 3′ primer, 5′-ACATG-CATCCATGTGAGAGCTCTGCTTATATAGACC-3′.

[1922] Intravenous tumor model: BALB/c mice are immunized intramuscularly with RNA vaccines, then 21 d after immunization, mice were injected intravenously with 5×10⁵ CT26.CL25 cells. Then 12 d later, pulmonary metastases are counted by experimenters ‘blinded’ to sample identity. For experiments with established CT26.CL25 tumor, BALB/c mice are injected intravenously with 10⁵ CT26.CL25 cells, and tumor is allowed to establish itself for 2 d. Mice are then therapeutically immunized with 100 μg RNA, then assessed for survival. Alternatively, 0.1 μg IL-12 (Genetics Institute, Cambridge, Mass.) is administered intravenously once daily for 3 d starting 12 h after the therapeutic immunization and survival is assessed. Results are given in Example 21 (Table VI).

### EXAMPLE 61

### Isolation of Lipid Rafts

[1923] Lipid rafts were isolated using modified lysis conditions and flotation on discontinuous sucrose gradients (20, 36, 37). In brief, cells (10⁸) are washed with ice-cold PBS and lysed for 30 mm on ice in 1% Triton X-100 in TNEV containing protease and phosphatase inhibitors (TNEV: 10 mM Tris/HCl, pH 7.5, 150 mM NaCl, and 5 mM EDTA; CLAP [2.5 mg/ml each of chymostatin, leupeptin, antipain, and pepstatin Λ in DMSO] and 1 mM sodium orthovanadate). The lysis solution is further homogenized with ten strokes in a Wheaton loose-fitting dounce homogenizer. Nuclei and cellular debris are pelleted by centrifugation at 900 g for 10 min. For the discontinuous sucrose gradient, 1 ml of cleared supernatant is mixed with 1 ml of 85% sucrose in TNEV and transferred to the bottom of a Beckman 14×89 mm centrifuge tube. The diluted lysate is overlaid with 6 ml 35% sucrose in TNEV and finally 3.5 ml 5% sucrose in TNEV. The samples are centrifuged in an SW41 rotor at 200,000 g for 16-20 h at 4° C. 1-ml fractions are collected from the top of the gradient.

### EXAMPLE 62

### Identification and Characterization of Streptococcal Pyrogenic Exotoxins, Staphylococcal Enterotoxins and SETs

[1924] SPEA Allelic Forms and Mutants. The method of preparation of SPEA allelic forms and mutuants is carried out by the method of Kline J B et al., Infect. Immun. 64: 861-869 (1996).

[1925] Purification of SPEA from S. pyogenes. One-liter cultures of 5. pyogenes Ros (generous gift of D. L. Stevens, Idaho VA Medical Center) are grown in NCTC-135 medium (Gibco/BRL, Grand Island, N.Y.) supplemented with glucose (21). Toxin was partially purified from cell-free culture filtrates by differential solubility in ethanol and acetate-buffered saline. Toxin which were precipitated four times were redissolved in 0.1 M imidazole-acetic acid (pH 5.0) and applied to a QAE-Sephadex A-50 (Pharmacia Fine Chemicals, Uppsala, Sweden) jacketed column. The toxin was eluted as a single peak with a NaCl gradient as described previously. Sodium dodecyl sulfate (SDS)-polyacryl-amide gel electrophoresis (PAGE) analysis of purified SPEA reveals a single band with the expected molecular mass of SPEA (25.8 kDa). The toxin is diaryzed against phosphate-buffered saline (PBS) and stored at −20° C.

[1926] Construction of pET15b-spea1. 150 ng of plasmid pA2 containing the SPEA gene (kindly provided by J. J. Ferretti, Oklahoma City, Okla.) is used as a template to amplify a 663-bp DNA fragment by PCR using primers

19b-A1
(5′-CCCCATATGCAACAAGACCCCGAT-3′) and
19b-A2
(5′-GGGGGATCCTTACTTGGTTGTTAG-3′).

[1927] These primers encode terminal BamIII and NdeI restriction sites, respectively. After digestion with BamHI and NdeI (Gibco/BRL), the DNA fragment, which encodes the mature protein without the leader peptide, is cloned into BamHI- and AMd-digested pET15b (Novagen, Madison, Wis.), producing the construct pET15t<<pe/i7. The complete nucleotide sequence of the inserted fragment is confirmed by the dideoxy-chain termination method. In .E. coli BL21(DE3) (Novagen), this construct expresses a fusion protein consisting of an N-terminal six-histidine-residue tag and SPEA1.

[1928] Generation of point mutations in SPEA. Site-directed mutagenesis of SPEA1 is performed by using PCR with oligonudeotides containing the desired nucleotide substitution. Briefly, 150 ng of pET15b-speA1, the mutant ohgonucleotide, and either primer 19b-A1 or primer 19b-A2 were used to generate two SPEA fragments with complementary ends. A second PCR is performed with the two overlapping SPEA fragments and flanking primers 19b-A1 and 19b-A2 to generate the full-length mutated SPEA gene. This PCR product is then digested with BamHI and NdeI and inserted into pET15b as described above. The complete nucleotide sequences of both strands of each mutated SPEA are determined by the dideoxy-chain termination method to ensure that only the single desired mutation was present.

[1929] Recombinant toxin nomenclature. Recombinant SPEA1 (rSPEA1) amino acid substitution mutants are named according to the original amino acid, its position in the mature toxin, and the resulting amino acid. For example, for rSPEA1-N₂0A, amino acid residue 20 was changed from asparagine to alanine. All mutant recombinant proteins generated contain single amino acid substitutions except for rSPEA1-S51L,N55A and rSPEA1-C87S,C90S, which have two substitutions. rSPEA1 is the toxin encoded by SPEA1 (40). rSPEA2 (also referred to as rSPEA1-G80S) is the toxin encoded

[1930] Expression and purification of rSPEA. Expression and purification of the recombinant toxins by using the pET expression vector is as described by manufacturer (Novagen). In brief, E. coli BL21 (DE3) was transformed with pET15-SPEA constructs for production of recombinant toxins. In this background, SPEA is under the control of a T7 promoter, and the T7 polymerase gene is on the E. coli chromosome under the control of an isopropylthio-D-galactopyranoside (IPTG)-inducible lac promoter. Cultures are grown to mid-exponential phase and induced to express toxin by the addition of 0.4 mM IPTG (Sigma Chemical Co., St Louis, Mo.). Cultures are grown for an additional 3 h after induction, harvested by centrifugation, and disrupted by sonication. rSPEA preparations are purified by metal chelation chromatography using His-Bind resin (Novagen). One hundred to 500 μg of toxin is digested with 1 μg of thrombin (Novagen) for 16 h at room temperature. The toxin is then purified from the His-tag leader sequence by ultrafiltration with 10,000-moleculat-weight cutoff filters (MSI, Westboro, Mass.). In E. coli BL21(DE3) (Novagen), this construct expresses a fusion protein consisting of an N-terminal six-histidine-residue tag and SPEA.

[1931] Generation of polydonal antisera reeognizing SPEA. Female New Zealand White rabbits are by SPEA2. The toxin encoded by SPEA1, SPEA3, is also termed rSPEA1-V761.immunized subcutaneously with 50 μβ of commercially available SPEA1 (Toxin Technologies, Sarasota, Fla.) in complete Freund's adjuvant (Gibco/BRL). Subsequent immunizations of 25 mg of toxin are administered at week 3 and then every 2 weeks in incomplete Freund's adjuvant (Gibco/BRL). Sera were first collected at week 6.

[1932] Western blot (immunoblot) analysis of rSPEA. Each of the mutant toxins and allelic forms is screened for instability by Western analysis. Toxins are analyzed by SDS-PAGE (12% acrylamide) and electroblotted to nitrocellulose. The nitrocellulose filters are incubated overnight in PBS supplemented with 5% low-fat dry milk and then stained with polyclonal rabbit antiserum against SPEA1. Anti-SPEA antibody binding is detected with horseradish peroxidase-labeled goat anti-rabbit antibody. Bands were visualized with 4-chloro-1-naph-thol (Sigma).

[1933] SDS-PAGE analysis. To look for the presence of disulfide bond formation between cysteine residues of rSPEA1, 2-p.g aliquots of purified toxins are mixed with gel running buffer (50 mM Tris-HCl [pH 6.8], 2% SDS, 0.1% bromophenol blue, 10% glycerol) with or without 2-mercaptoethanol (final concentration, 1%). The samples are then boiled for 5 min and electrophoresed for 5 h at 40 mA on an SDS-12% polyacrylamide gel Protein bands were visualized by staining with Coomassie brilliant blue R250 (Bio-Rad, Melville, N.Y.).

[1934] Mitogenicity assays. Heparinized whole blood is obtained from healthy donors. Samples were fractionated on Ficoll-Paque (Pharmacia Biotech, Pisca-taway, N.J.), and the peripheral blood mononuclear cells (PBMCs) are harvested and washed three times in PBS. Then cells (10⁵) were added to 96-well U-bottom plates in 200 μl of complete RPMI1640 supplemented with 10% fetal calf serum (PCS). PBMCs are incubated for 72 h at 37° C. with various concentrations of rSPEA toxins under atmospheric conditions of 5% CO₂; 1 uCi of [3H]thymidine (ICN Biochemicals, Costa Mesa, Calif.) is added to each well, and the cells are incubated for an additional 24 h. Cells were harvested onto glass fiber filters, and [³H]thymidine uptake is quantitated by liquid scintillation counting. For each mutant toxin, PBMCs from at least three distinct donors are used.

[1935] Flow cytometry of PBMCs. PBMCs (10⁶) from healthy donors are incubated with toxins at a concentration of 1 μg/ml for 4 days. Cells were harvested, washed three times with PBS, and applied to a FACScan flow cytometer (Becton Dick-inson).

[1936] Cell lines. L-cell transfectants L66 (vector only) and L54.1 (DQβ3/DQα2) are the generous gift of Robert Karr, Monsanto Company. Transfectants were maintained in suspension in petri dishes in Oulbecco modified Eagle medium (DMEM) with 10% PCS, 2 mM L-glutamine, 100 U of penicillin per ml, 100 μg of streptomycin per ml, and 250 μg of the neomycin analog G418 per ml for selection. Before use, transfectants are examined by fluorescence-activated cell sorting analysis with fluorescein isothiocyanate-labeled anti-HLA-DQ3 (KS13) to confirm the expression and surface localization of the DQ molecule. Antibody KS13 is the generous gift of Soldano Ferrone, New York Medical College, Valhalla, N.Y.

[1937] Radiolabeled rSPEA binding assays. rSPEA1 is iodinated by using chloramine-T (Sigma). One hundred μg of toxin was incubated with 0.5 mCi of Na¹²⁵I and 5 μl(5 mg/ml) of chloramine-T in 100 μl of 100 mM Tris-150 mM NaCl (pH 7.4) for 10 min. The reaction is terminated by the addition of 20 μl (5 mg/ml) of sodium metabisulfate (Sigma). Labeled toxin was separated from unincorporated radioactivity on a 1-ml Sephadex G-25 column, which had been preequilibrated with PBS. The Kd of rSPEA-DQ interaction is determined by incubating 10⁶ L54.1 cells (expressing class II MHC) with various concentrations of mI-rSPEA in a total volume of 100 μl of DMEM-10% FCS-0.1% sodium azide. Nonspecific binding is estimated by incubating separate tubes with unlabeled competitor toxin at a concentration 100 times greater than that of labeled toxin. Cells are incubated at 37° C. for 4 h with agitation every 20 min and then pelleted through an oil gradient (80% dibutyl phthalate, 20% olive oil). Pellets are cut from the tubes, and cell-associated ¹²⁵I was measured on a gamma counter.

[1938] K, determinations are evaluated in a similar fashion except that additional tubes containing various concentrations of ¹²⁵I-rSPEA phis unlabeled mutant competitor are analyzed. Lineweaver-Burk plots of the reciprocal of toxin bound versus toxin free are used to determine inhibition constants.

[1939] Structure of SPEA. Predicted ribbon structure of SPEA was generated by the Swiss Model Automated Protein Modelling Server, Glaxo Institute for Molecular Biology, Geneva, Switzerland. Primary amino acid sequence of SPEA is modeled on the crystal structures of staphylococcal enterotoxin A (SEA) and staphylococcal enterotoxin E (SEE). Crystal coordinates for SEA and SEE are from the Brookhaven Database Crystal Coordinates and are deposited by Swaminathan and Sax. Structure is viewed by using the Raswin Molecular Graphics Viewer software, version 2.4, 1994 (R. Sayte, Department of Computer Science, University of Edinburgh, Edinburgh, United Kingdom).

[1940] Isolation and Purification of SSA is by the method of Mollick J et al., J. Clin. Invest. 92: 710-719 (1993) and Reda K et al., Infect. Immun. 62: 1867-1874 (1994)

[1941] Purification of SSA from S. pyogenes strain Weller. Because RDA has been used to purify several staphylococcal enterotoxins, this material is useful in identifying novel S. pyogenes superantigens. Concentrated culture supernatants from strain Weller are chromatographed on a RDA column, the column was eluted with a phosphate step gradient, and fractions are tested for the presence of a class II-dependent T cell mitogen. We identify such an activity eluting between 60 and 150 mM PO4, corresponding approximately to fraction numbers 8-55. This activity elutes in a broad peak and does not correspond to a detectable protein peak. Examination of an aliquot of the pooled activity by SDS-PAGE gel reveals many proteins, some in the 30-kD range. The pooled active fractions are fractionated from the RDA column by gel filtration (G-75) and anion exchange chromatography and active fractions from each column are selected. The product from the final chromatography step consistspredominantly of three proteins. The proteins are blotted to a solid support and analyzed by NH2-terminal sequencing. The higher Mᵣ protein is identified as SP and/or SPE-B. These two proteins are closely similar and are not distinguished based on the 29 amino acids sequenced. The lower Mᵣ protein, ˜27 kD in size, yields a 59-amino acid NH2 terminus that is not notably homologous to any previously characterized protein. The middle band (28 kD) displays an NH2 terminus strikingly similar to the NH2 termini of SEB, SEC, and SEC3 and dissimilar to M protein. The 28-kD molecule with the SEB-like NH2 terminus is designated SSA.

[1942] Purification of SSA by Ab affinity chromatography. To determine whether or not SSA isresponsible for the superantigen activity, our efforts are directed to its purification. An anti-peptide antiserum is raised against the first 19 amino acids of SSA. To determine the ability of the anti-SSA Abs to bind native SSA, a concentrated streptococcal supernatant from 16 liters is chromatographed on RDA in an effort to enrich for SSA. The RDA eluate is passed over the anti-SSA Ab column and the column eluted. Examination of the eluate by SDS-PAGE gel, and silver stain shows one prominent band at 28 kD, and two minor bands, one at ˜25 kD and one at ˜12 kD. NH2-terminal sequencing of the 28-kD product shows the SSA NH2 amino terminus. To determine whether the lower Mᵣ species were contaminants or SSA degradation products, an identical sample is subjected to immunoblot analysis. Anti-SSA antibodies detect all three species shown in the silver stain gel, indicating that these lower molecular weight bands are breakdown products of the 28-kD protein. Because the antibodies are directed against the NH2 terminus, these products likely represent SSA molecules missing COOH terminal sections.

[1943] PCR amplification and cloning of the 5′ half of ssa from Weller genomic DNA. Nondegenerate, nonoverlapping oligonucleotides (SSA1, 5′-AGTCAACCAGATCCTACGCCAG AACAATTGAA-3′; SSA2, 5′-AAATCGAGTCAATTTAC GGAGTTATGGCC-3′) are designed on the basis of the SSA N-terminal protein sequence with a bias toward SEB codon usage. We hypothesized that SSA may retain homology to SEB in regions further downstream from the 24 N-terminal residues, especially in regions relatively conserved among all known staphylococcal and streptococcal superantigens. In order to amplify ssa from Weller genomic DNA with PCR, we pair each SSA oligonucleotide with an oligonucleotide (SEB7, residues 658 to 675) specific for a region in SEB immediately downstream of the disulfide loop. Weller genomic DNA (200 ng) is combined with 50 pmol each of sense (SSA1 or SSA2) and antisense (SEB7) primers, a 200 μM concentration of each deoxynucleoside triphosphate, and 10 μl of 10×Pfu polymerase buffer 1 (Stratagene) in a total volume of 100 μl. Reaction mixtures are overlaid with 100 μl of mineral oil and denatured at 95° C. for 7 min before Pfu polymerase (2.5 units) (Stratagene) is added. PCR conditions were as follows: 1 min at 95° C., 2 min at 37° C., and 3 min at 72° C. for 25 cycles in a thermocycler (Perkin-Elmer Corp., Norwalk, Conn.). Combinations of SSA1 or SSA2 with SEB7 specifically amplified products of approximately 340 or 310 bp, respectively, from strain Weller genomic DNA, but not from strain Gall DNA, which does not produce SSA, PCR products were ligated to the pBluescript SK˜ vector to make pKR1 and pKR2, which are used to transform XL-1 Blue E. coli. Nucleotide sequence analysis of pKR1 and pKR2 inserts predicted amino acid sequences identical to that determined by N-terminal protein sequencing of native SSA from strain Weller S. pyogenes (39).

[1944] Subcloning and expression of recombinant SSA. The nucleotide sequence encoding the mature form of SSA is PCR amplified from Weller genomic DNA with flanking primers and digested with HincII and SpeI, which cut 46 bp upstream and 33 bp downstream, respectively, of the ssa open reading frame. This fragment was ligated to the pBluescript II KS˜ expression vector (Stratagene) to make pKR4. An XL-1 Blue E. coli strain carrying pKR4 was grown to an optical density at,600 nm of 1.0 and induced to express SSA by the addition of IPTG (isopropyl-β-D-thiogalactopyranoside) to a final concentration of 0.1 mM. After further incubation at 37° C. with shaking for 3 h, bacteria were harvested by centrifugation and resuspended in TE, pH 8.0. An aliquot of cells was then mixed with an equal volume of SDS sample buffer, and the whole cell lysate was analyzed by SDS-polyacrylamide gel electrophoresis (SDS-PAGE) and SSA immunoblot analysis. Lysates of E. coli strains carrying pMV7 or pBluescript, containing seb or no insert in the multicloning cassette, respeclively, were processed in parallel as positive and negative controls. Uninduced whole cell lysates were also examined.

[1945] Identification and Characterization SMEZ, SMEZ2, SPE-G, SPE-H and SPE-J is given in Profit T et al. J. Exp. Med. 189: 89-101 (1999).

[1946] Identification of Novel SAgs. The novel SAgs are identified by searching the S. pyogenes M1 genome database at the University of Oklahoma with highly conserved β5 and a4 regions of streptococcal and staphylococcal SAgs, using a TBlastN search program. The ORFs are defined by translating the DNA sequences around the matching regions and aligning the protein sequences to known SAgs using the computer program Gap. Multiple alignments and dendrograms are performed with Lineup and Pileup. We used the FAST A program for searching the SwissProt (Amos Bairoch, Switzerland) and PIR (Protein Identification Resource) protein databases. The leader sequences of SPE-G and SPE-H are predicted using the SP Scan program. All computer programs are part of the Genetics Computer Group package (version 8).

[1947] Cloning of smez, smez-2, spe-g, and spe-h. 50 ng of S. pyogenes M1 (ATCC 700294) or S. pyogenes 2035 genomic DNA is used as a template to amplify the smez DNA fragment and the smez-2 DNA fragment, respectively, by PCR using the primers smez-fw (TGGGATCCTTAGAAGTAGATAATA) and smez-rev (AAGAATTCTTAGGAGTCAATTTC) and Taq Polymerase (Promega Corp.). The primers contain a terminal tag with the restriction enzyme recognition sequences BamHI and EcoRI, respectively. The amplified DNA fragment, encoding the mature protein without the leader sequence (37) is cloned into a T-tailed pBlueScript SKII vector (Stratagene).

[1948] Spe-g and spe-h are cloned by a similar approach, using the primers

spe-g-fw
(CTGGATCCGATGAAAATTTAAAAGATT-TAA) and
spe-g-rev
(AAGAATTCGGGGGGAGAATAG), and
spe-h-fw
(TTGGATCCAATTCTTATAATACAACC) and
spe-h-rev
(AAAAGCTTTTAGCTGATTGACAC), respectively.

[1949] The DNA sequences of the subcloned toxin genes are confirmed by the dideoxy chain termination method using a Licor automated DNA sequencer (model 4200). As the DNA sequences from the genomic database are all unedited raw data, three sub-clones of every cloning experiment areanalyzed to insure that no Taq polymerase-related mutations were introduced. The DNA sequence of the smez-2 gene has been annotated in EMBL/Genbank/DDBJ under accession number AF086626.

[1950] Expression and Purification of rSMEZ, rSMEZ-2, rSPE-G, and rSPE-H. Subcloned smez, smez-2, and spe-g fragments are cut from pBlueScript SKH vectors, using restriction enzymes BamHI and EcoRI (GIBCO BRL), and cloned into pGEX-2T expression vectors (Pharmacia Biotech). Due to an internal EcoRI restriction site within the spe-h gene, the pBlueScript:spe-h subclone is digested with BamHI and HindIII and the spe-h fragment is cloned into a modified pGEX-2T vector that contains a HindIII 3′ cloning site.rSMEZ, rSMEZ-2, and rSPE-H are expressed in Escherichia coli DH5a cells as glutathione-S-transferase (GST) fusion proteins. Cultures are grown at 37° C. and induced for 3-4 h after adding 0.2 mM isopropyl-p-D-thiogalactopyranoside. GST-SPE-G fusion protein is expressed in cells grown at 28° C. The GST fusion proteins are purified on glutathione (GSH) agarose and the mature toxins are cleaved off from GST by trypsin digestion. All recombinant toxins, except rSMEZ, were further purified by two rounds of cation exchange chromatography using carboxy methyl sepharose (Pharmacia Biotech). The GST-SMEZ fusion protein is trypsin digested on the GSH-column and the flow-through containing the SMEZ is collected.

[1951] Gel Electrophoresis. All purified recombinant toxins are tested on a 12.5% SDS-polyacrylamide gel according to Laemmli's procedure. The isoelectric point of the recombinant toxins is determined by isoelectric focusing on a 5.5% polyacrylamide gel using ampholine, pH 5-8 (Pharmacia Biotech). The gel is run for 90 min at 1 Watt constant power.

[1952] Toxin Proliferation Assay. Human PBLs are purified from blood of a healthy donor by Histopaque Ficoll (Sigma Chemical Co.) fractionation. The PBLs are incubated in 96-well round-bottomed microtiter plates at 10⁵ cells per well with RPMI-10 (RPMI with 10% PCS) containing varying dilutions of recombinant toxins. The dilution series is performed in 1:5 steps from a starting concentration of 10 ng/ml of toxin. After 3 d, 0.1 μCï [³H]thymidine is added to each well and cells are incubated for another 24 h. Cells are harvested and counted on a scintillation counter. Mouse leukocytes are obtained from spleens of five different mouse strains (SJL, B10.M, B10/J, C3H, and BALB/c). Splenocytes are washed in DMEM-10, counted in 5% acetic acid, and incubated on microtiter plates at 10⁵ cells per well with DMEM-10 and toxins as described for human PBLs.

[1953] TCR Vβ Analysis. Vβ enrichment analysis is performed by anchored multiprimer amplification. Human PBLs are incubated with 20 pg/ml of recombinant toxin at 10⁶ cells/ml for 3 d. A twofold volume expansion of the culture followed with medium containing 20 ng/ml IL-2. After another 24 h, stimulated and resting cells are harvested and RNA isprepared using Trizol reagent (GIBCO BRL). A 500 bp β chain DNA probe is obtained by anchored multiprimer PCR, radiolabeled, and hybridized to individual Vβ5 and a Cβ DNA region dot-blotted on a Nylon membrane. The membrane is analyzed on a Storm PhosphorImager using ImageQuant software (Molecular Dynamics). Individual Vβs are expressed as a percentage of all the Vβs determined by hybridization to the Cβ probe.

[1954] Jurkat Cell Assay. Jurkat cells (a human T cell line) and LG-2.cells (a human B lymphoblastoid cell line, homozygous for HLA-DR1) are harvested in log phase and resuspended in RPMI-10. 100 μl of the cell suspension, containing 10⁵ Jurkat cells and 2×10⁴ LG-2 cells are mixed with 100 μl of varying dilutions of recombinant toxins on 96-well plates. After incubating overnight at 37° C., 100-μl aliquots are transferred onto a fresh plate and 100 μl (10⁴) of Sel cells (IL-2-dependent murine T cell line) per well are added. After incubating for 24 h, 0.1 μCí [³H]thymidine is added to each well and cells are incubated for another 24 h. Cells were harvested and counted on a scintillation counter. As a control, a dilution series of IL-2 is incubated with Sel cells.

[1955] Computer-aided Modelling of Protein Structures. Protein structures of SMEZ2, SPE-G and SPE-H are created on a Silicon Graphics computer using InsightII/Homology software (Biosym Technologies). The SAgs SEA, SEB, and SPE-C are used as reference proteins to determine structurally conserved regions (SCRs). Coordinate files for SEA (1ESF), SEB (1SEB), and SPE-C (1AN8) are downloaded from the Brookhaven Protein Database. The primary amino acid sequences of the reference proteins and SMEZ-2, SPE-G, and SPE-H, respectively, are aligned, and coordinates from superimposed SCRs are assigned to the model proteins. The loop regions between the SCRs are generated by random choice. MolScript software is used for displaying the computer-generated images.

[1956] Methods of isolation and characterization of SPEC is carried out by the methods of Li P L et al., J. Exp. Med. 186: 375-383 (1997)

[1957] Toxin Puification. All toxins are expressed from the pGEX vector in Escherichia colt as glutathione S transferase (GST) fusion proteins and purified by glutathione chromatography. Mature toxins are cleaved from GST by trypsin digestion and purified by two rounds of cation exchange chromatography. The first round uses carboxymethyl sepharose and the second on a POROS HS (Perceptive Systems, Cambridge, Mass.) HPLC column. All toxins are resistant to trypsin digestion except SEB which has a single cleavage site in the disulphide loop region. This does not affect SEB activity.

[1958] Toxin Proliferation Assays. Human peripheral blood lymphocytes are purified by Ficoll-Hypaque and incubated for 3 d at 106 cells/ml in duplicate in 96-well microtiter plates in media containing varying dilutions of recombinant toxins. 0.1 μCi [3H]thymidine is added to each well, and cells were incubated a further 24 h. Plates areharvested and counted on a scintillation counter.

[1959] TCR Vβ Analysis. These are performed using the reverse dot-blot procedure. In brief, human peripheral blood lymphocytes are incubated at 10 Vml with 1 ng/ml of recombinant toxins for 3 d. The cultures are expanded twofold with medium containing 20 ng/ml IL-2. Cells are harvested at 4 d and RNA made by standard procedures. TCR β-chain messenger is reverse transcribed using a set of primers specific for a conserved region in all β-chain genes. Amplification of a 500-bp Vβ probe is accomplished by an anchor primer to the 5′ end of the β-chain primers plus a single Cβ region primer. This probe is radiolabeled and reverse blotted to filters containing individual β-chain genes. Relative changes in individual β-chain mRNA are compared to unactivated PBL.

[1960] Anti-TCR mAb FACS Staining.Activated T cells are incubated for 1 h on ice with 25 ml of anti-TCR BV2 (MPB2/Cll; a gift from A. W. Boylston, Universtiy of Leeds, Leeds, UK), anti-BV551 (LC4; a gift from R. Levy, Stanford University Medical School, Stanford, Calif.), anti-BV5S3 (42/1C1; a gift from A. W. Boylston, Universtiy of Leeds, Leeds, UK), anti-BV8.1 (C305; a gift from A. Weiss, University of California, San Francisco, Calif.), and anti-BV12S (S511; a gift from D. Posnett, Cornell University Medical College, NY). Washed cells are then incubated with 1 ml FITC goat anti-mouse (Becton Dickinson) and incubated on ice for a further 30 min. After washing, cells are analyzed on a FACSCAN®.

[1961] Zinc Blots. Recombinant toxins (10 (ug) are incubated in triplicate with 10 μM EDTA followed by 100 μM 65ZnCl (New England Nuclear, Boston, Mass.) in 20 mM Tris, pH 8.0, 10 mM MgCl2, 0.15 M NaCl made zinc free by addition of chelex resin (Sigma Chemical Co.). Samples are then dot blotted to nitrocellulose filters using a 96-well dot-blot apparatus. Filters are washed briefly three times with zinc-free buffer, and then autoradiographed. Spots are cut out and counted on gamma counter (Packard Instrs., Meriden Conn.) to quantify 65Zn bound to each toxin.

[1962] Nondenaturing SDS Electrophoresis. Toxin samples are incubated in standard Laemmli reducing sample buffer (containing 1% SDS and 10 mM dithiothreitol), and then resolved as normal of a 12.5% acrylamide gel. For denaturing conditions, samples are heated,to 100° C. for 2 min before loading. To prevent dimers from dissociating during running, the power is. maintained below 2 W (20 mA and 100 V). Some reduced samples are treated with 20 mM iodoacetic acid, pH 7.0, before loading. EDTA is added to some samples at 10 mM. incubation at 37° C. as the percentage of LG-2 cells in aggregates, and is determined by light microscopy.

[1963] Western Blotting of S. pyogenes Strain 2035-derived SPE-C. S. pyogenes strain 2035 is grown under anaerobic conditions in brain heart fusion medium at 37° C. for 24 h without shaking. Supernatant proteins are concentrated by sequential (NH₄)₂SO₄ precipitations, with cuts of <40%, 40-60% 60-80%, and 80% saturation, and resuspended in 50 mM Tris-1 mM EDTA, pH 7:4, at 500-1,000 times their original concentration. Recombinant SPE-C or 10 μl of the 60-80% (NH₄)₂SO₄-precipitable fraction of 2035 supernatant are combined with an equal volume of nonreducing 2% SDS sample buffer and separated by 0.1% SDS-12% PAGE. Denatured samples are heated (95° C.) for 2 min before analysis. Fractions are dialyzed extensively against 25 mM Tris-50 mM NaCl-1 mM EDTA, pH 7.4, to remove salt. After separation by SDS-PAGE, proteins are transferred to a nitrocellulose filter (Hybond-C; Amersham Corp., Arlington Heights, Ill.) in an electroblotting apparatus using Towbin buffer lacking SDS (25 mM Tris.HCl, pH 8.5-150 mM glycine-10% methanol). The filter is blocked in PBS-0.05% Tween-5% nonfat dried milk powder-0.1%) normal rabbit serum and stained with 1:6,000 peroxidase-labeled affinity-purified rabbit and-SPE-C immunoglobulin. The peroxidase conjugate is detected on radiographic film by chemiluminescence (ECL; Amersham Corp.) according to the manufacturer's instructions.

[1964] Size Exclusion Chromatography. Recombinant SPE-C. (2 mg/ml) is dialyzed at 4° C. overnight in 20 mM BisTris-Tris, pH 6.0 or 9.0. 20 μï samples are diluted into 100 μï 50 mM BisTris, pH 6.0, 7.0, 8.0, or 9.0/0.1 M NaCl and incubated for 1 h at room temperature before separation at 1 ml/min (±0.05 ml/min) on a Superosel2 (Pharmacia) high resolution HPLC column attached to a Biocad Sprint (Perceptive Systems) preequilibrated with the respective incubation buffer. Trace chromatograms monitoring Abs₂₈₀ₙₘ, pH, and conductivity are all recorded directly and subsequently analyzed for retention times, peak integration, and peak assignment using the on-line Biocad software. Traces are grouped and printed using the stacked trace mode which automatically aligns each trace to the injection point.

[1965] Identification and Characterization of the Staphylococcal enterotoxins SEG, SEH, SEI, SEJ, SEK, SEL, SEM is carried out by the method of Jarraud S J Clinical Microbiology (1999).

[1966] Strains. S MJB1316 (a gift from Sibyl Munson, University of Wisconsin, Madison, Wis.), an RN450 derivative that contains the cloned seg gene on the staphylococcal expression vector pRN5548, is used as seg positive control. The following S. aureus strains were used to check the specificity of PCR amplification: FDA-S6 (ATCC 13566 (sea+ seb+)), FRI-137 (ATCC 19095 (sec+, seg+, seh+, sei+)), FRI-1151 m (sed+), FRI-326 (ATCC 27664 (see+)), FRI-569 (ATCC 51811 (seh+)), FRI-1169 (tst+), TC-7 (eta+, seg+, sei+), and TC-146 (etb+seg+ sei+). Two hundred thirty S. aureus clinical isolates are collected. They are isolated from 58 patients with S. aureus infection (arthritis, skin infection, pneumonia, or infective endocarditis), 102 patients with acute toxemia (TSS, SSF, or SSSS), and 70 asymptomatic nasal carriers. All strains are collected from hospitals located throughout France and are identified as S. aureus by their ability to coagulate citrated rabbit plasma (bioMerieux, Marcy-I'Etoile, France) and to produce a clumping factor (Staphyslide Test; bioMerieux). Escherichia coli TG1 is used for plasmid amplification and genetic manipulations.

[1967] DNA amplification and sequencing DNA is extracted from A900322 cultures and used as a template for amplification with primers sei-1 and seg-2. Primers wsei and wseg are designed following identification of suitable hybridization sites in the sei and seg genes and were compatible with the Clontech Genome Walker kit (Ozyme; Montigny-Le Bretonneux, France), which is suitable for cloning unknown DNA sequences adjacent to a known sequence. This kit is used, according to the supplier's instructions, to identify sei and seg flanking regions using primers hindIII and wsei on a HindIII chromosomal digest for the amplification of the sei-upstream region; and primers hpaI and wseg on an HpaI chromosomal digest for the amplification of the seg-downstream region. PCR products are analyzed by electrophoresis through 0.8% agarose gels (Sigma, St. Louis, Mo.), purified using the High Pure PCR Product Purification kit (Boehringer Mannheim, Meylan, France), and sequenced (Genome Express, Grenoble, France). Sequences are compiled, analyzed, and compared using Blast (http://www.ncbi.nlm.nih.gov/BLAST), GeneJokey, and ClustalX software (European Bioinformatics Institute, Cambridge, U.K., http://www.ebi.ac.uk).

[1968] Toxin-gene detection. Sequences specific for sea-e, seg-i, tst, eta, and etb, encoding SEA-E, SEG-I, TSST-1, ETA, and ETB, respectively, are detected by PCR. DNA from clinical isolates is extracted from cultures and used as a template for amplification with the primers described in Table 1 (Eurogentec, Seraing, Belgium). Table 1 of primers used is given-in Jarraud et al., J. Clin. Micro. (1999). Amplification of gyrA is used as a control to confirm the quality of each DNA extract and the absence of PCR inhibitors. All PCR products are analyzed by etectrophoresis through 1% agarose gels (Sigma).

[1969] Detection of bacterial RNA by RT-PCR. Total RNA is extracted from staphylococcal cultures by using RNeasy spin columns (Qiagen, Courtaboeuf, France). cDNA is synthesized using Ready-To-Go RT-PCR beads (Pharmacia Biotech, Orsay, France) by incubating 0.1 μg of total RNA with the following pairs of primers (primer 5′, sel3), (sel-4, sel-5), (sel 1, sel2), (invsel2, invsem1), (sem1, invsei1), (sei1, sei2), (invsei2, ψent2), (ψent1, invsek 1), (sek1, sek2), (invsek2, invseg1), (seg1, seg2), (invseg2, primer 3′). The reaction mixtures are incubated with each primer pair described above, at 42° C. for 30 min for reverse transcription, followed by 30 cycles of amplification (1-min denaturation at 94° C. 1-min annealing at 55° C., and 1-min extension at72° C.). The RT-PCR products are then analyzed by electrophoresis through 1% agarose gel. RNA extracts are tested for DNA contamination by preincubating the reaction mixtures at 95° C. for 10 min to inactivate reverse transcriptase before the RT-PCR.

[1970] Production and purification of recombinant enterotoxins. Primers are designed following identification of suitable hybridization sites in sel, sem, sei, sek, and seg. The 5′ primers are chosen within the coding sequence of each gene, omitting the region predicted to encode the signal peptide, as determined by hydrophobicity analysis according to Kyte and Doolitttle with GeneJockey software and SignalP V1.1 World Wide Web Prediction Server (www.cbs.dtu.dk/services/SignalP/); the 3′ primers are chosen to overlap the stop codon of each gene. A restriction site is included in each primer. DNA is extracted from A900322 or MJB1316 and used as a template for PCR amplification. PCR products and plasmid DNA are prepared using the Qiagen plasmid kit. PCR fragments were digested with EcoRI and PstI (Boehringer Mannheim) and ligated (T4 DNA ligase; Boehringer Mannheim) with the pMAL-c2 expression vector from New England Biolabs (Ozyme) digested with the same restriction enzymes. The resulting plasmids are transformed into E. coli TG 1. The integrity of the ORF of each construct is verified by DNA sequencing of the junction between pMAL-c2 and the different inserts. The fusion proteins are purified from cell lysates of transfected E. coli by affinity chromatography on an amylose column according to the supplier's instructions (New England Biolabs).

[1971] T cell proliferation assays. PBL from healthy donors are cultured in 24-well plates (10⁶ cells/well) in RPM11640 medium supplemented with 8% pooled human serum and 10 μg/ml recombinant staphylococcal toxin. rIL-2 (50 IU/ml) is added on day 5. When necessary, T cell cultures are diluted in IL-2-supple-mented medium until TCR analysis. For controls T cells from the same donors that are stimulated with 0.5 μg/ml Phaseolus vulgaris leucoagglutimn (PHAL) (Sigma) are used.

[1972] Flow cytometry. The following mAb (mAb; specificity indicated in brackets) are used for flow cytometry: E2.2E7.2 (Vβ2), LE89 (Vβ3), IMMU157 (Vβ5.1), 3D11 (Vβ5.3), CRI304.3 (Vβ6.2), 3G5D15 (Vβ7), 56C5.2 (Vβ8.1/8.2), FIN9 (Vβ9), C21 (Vβï 1), S511 (Vβ12), IMMU1222 (Vβ13.1) JIJ74 (Vβ13.6), CAS1.1.13 (Vβ14), Tamaya1.2 (Vβ16), E17.5F3 (Vβ17), BA62.6 (Vβ18), ELL1.4 (Vβ20), IG125 (Vβ21.3), IMMU546 (Vβ22), and HUT78.1 (Vβ23). These mAb, and CD4- and CD5-specific mAb, is purchased from Beckman/Couker/Immunotech (Marseille, France). Cells are phenotyped by indirect immunofluorescence, as described previously. Briefly, cells are incubated with unconjugated mAb for 30 mm at room temperature, then washed and incubated with FITC-conjugated rabbit anti-mouse Ig antiserum (BioAtlantic, Nantes, France) for 30 min on ice. After washing, cells are analyzed by flow cytometry on a FACScan apparatus (Becton Dickinson, Mountain View, Calif.) using the LYSYS II software package on a FACstation.

[1973] Immunoscope analysis. Total RNA is extracted using the Tnzol reagent (Life Technologies, Gaithersburg, Md.). TCR β-chain-specific primers are as described previously, and reverse transcription, PCR amplification, and run-off steps are performed as reported previously. Fluorescent DNA products are loaded on a sequencing gel and analyzed with the Immunoscope software.

[1974] Identification of the seg and sei flanking regions. When this work was initiated, the coding regions of only seg and sei were available, and the two genes were known to be in tandem orientation, separated by a 1.9-kb DNA fragment in S. aureus strain A900322. A 3.2-kb fragment is thus amplified by PCR with primers sei1 and seg2 and was then sequenced. The intergenic 1.9-kb DNA sequence contains three open reading frames (ORF1, 2, and 3) of 399, 327, and 777 bp, respectively. Comparison of the deduced amino acid sequences of these ORFs with translated sequences from GenBank showed that the putative proteins corresponding to these ORFs had substantial sequence similarities to known SEs: ORF1 exhibited homology to the N-terminal region of SEB; ORF2 to the C-terminal region of SEC; and ORF3 to SEA. The PCR “walking” strategy is chosen to identify the seg and sei flanking regions. The use of primers wsei and hindIII on HindIII digests amplifies and allowssequencing of the 3.2 kb of DNA upstream of sei. Analysis of this sequence showed two significant ORFs (ORF4 and ORF5) of 783 and 720 bp, respectively. ORF4 exhibited homology with SEJ, and ORF5 with SEI. The use of primers wseg and hpaI on HpaI digests amplified a 0.8-kb fragment downstream of seg. Sequence analysis of this fragment reveals no other significant ORFs. The concatenated sequence of seg-sei-intergenic, -upstream and -downstream regions is validated by sequencing a 6.189-kb PCR fragment encompassing the whole region. Although sei in strain A900322 is 100% homologous with the sequence deposited in GenBank (accession number AF064774), seg in strain A900322 showed one mutation, corresponding to a Leu→Pro substitution at position 29. This new variant is designated SEGL29P. ORFs 1-5 arehomologous but not identical with any known enterotoxins hence they corresponded to new enterotoxins. However, ORF1 and 2 are at least 50% shorter than any of the known enterotoxins. ORF-1 possesses a satisfactory Shine-Dalgarno (SD) sequence (TGGAGT-N7-AUG, consensus AGGAGG-N6/10-AUG) but, in comparison with SEB, to which it is highly related, shows a large deletion of its 3′ end, which corresponds to a region that is essential for biological (superantigenic) activity. ORF2 has neither an SD sequence nor a signal peptide, and resembles an N-terminal-truncated SEC. Accordingly, ORF1 and 2 are designated ψ ent1 and 2, respectively, meaning they represent pseudogenes with no likely biological function. In contrast, ORFs 3, 4, and 5 have sizes consistent with active enterotoxin-like molecules. ORF5 possesses a satisfactory SD sequence and translation start site, whereas ORF3 and ORF4 have an adequate SD sequence in front of a noncanonical, although suitable, translation start site (ATT) coding the thionine. Thus. ORF3, ORF4, and ORFS are designated sek, sel, and sem, respectively. Thus, the 6301-bp DNA region identified contains seg and set plus three potential enterotoxin genes (sek, sel, and sem) and two pseudogenes (ψ ent1, ψ ent2), all in the same orientation. We designated this region egc for “enterotoxin gene cluster.” With the exception of plasmid pIB485, which contains sed and sej in opposite orientations separated by 895 nucleotides, and the staphylococcal pathogenicity island, which contains tst and ent separated by 10.234 kb, no such gene cluster organization has been previously described for enterotoxin genes.

[1975] Transcriptional analysis. To investigate whether this seg transcript was polycistronic, i.e., encoded one or more of the ORFs identified in egc, c-DNA is generated from strain A900322 total RNA by reverse transcription and amplified by PCR using primer pairs located within each gene and bracketing adjacent genes. Abundant RT-PCR products (B to K) of the expected size are obtained using the corresponding primer pairs. In contrast, no RT-PCR product A (primer 5′, seI3) nor L (primer invseg2 and primer 3′) is obtained. These results suggest that the seven genes and pseudogenes composing egc are cotranscribed, and that the 5′ and 3′ ends of the transcript must be close to the beginning of sel and to the end of seg, respectively. Sequence analysis reveal putative −10 and −35 promoter sequences (TTGTCT-N15-TAATTT-N134-ATT) upstream of the sel start codon. The 3′ end may lie at an inverted repeat at position 6018-6067, which is a potential transcription termination signal, 5830 nucleotides downstream of the putative transcription start site. These results suggest that egc is an operon.

[1976] Superantigen activity. The association of related genes that are cotranscribed suggested that the resulting peptides might have complementary effects on the host's immune response. One hypothesis is that gene recombination created new variants of toxins differing by their superantigen profiles. Purified recombinant SEL, SEM, SEI, SEK, and SEGL29P expressed in E. coli are studied for their ability to induce selective expansion of T cells bearing particular TCR Vβ regions in short-term PBL culture. As shown in Tables III and IV, recombinant SEL SEM, SEI, and SEK consistently induces selective expansion of distinct sets of Vβ subpopulations. By contrast. SEGL29P fails to trigger expansion of any of the 23 Vβ subsets. The sum of results obtained with each of these recombinant toxins globally corresponds to the selective expansion of Vβ subpopulations induced by crude supernatant of staphylococcal culture of strains that harbored egc (data not shown). This suggests that the maltose-binding protein portion of the fusion toxins do not significantly influence the Vβ specificity of these superantigens. To investigate whether the L29P mutation could explain the lack of superantigen activity, a rSEG with an L29 codon is constructed from S. aureus strain MJB1316 (which contains the cloned seg on a plasmid) and then expressed in E. coli, and the superantigen activity of this toxin is tested. SEGL29.induces selective expansion of Vβ14 and, to a lesser extent, Vβ13.6,OT cells (Table III). The L29P mutation thus accounts for the complete loss of superantigen activity. Computer modeling of the two-dimensional structure of the wild-type and mutated proteins reveals no major conformational differences between the two proteins (not shown). It is likely that L29 is located at a position crucial for proper superantigen/MHC II interaction. In addition to the selective expansion of TCR Vβ subsets observed with the different toxins, flow cytometry reveals preferential expansion of CD4 T cells in SEI and SEM cultures. By contrast, the CD4/CD8 ratios in SEK-, SEL-, and SEG-stimulated T cell lines are close to those in fresh PBL. This phenomenon, which is observed with cells from several donors, reflects a variable contribution of the CD4 coreceptor to the T cell activation process, depending on the affinity of the TCR for the superantigen/MHC complex. To document the TCR Vβ composition of superantigen-stimulated T cell lines and the clonal diversity of the expanded TCR Vβ subsets, the size distribution of PCR-amplified TCR β-chain junctional products is studied using the Immunoscope technique. Results of this molecular analysis are in good overall agreement with those obtained by flow cytometry, as similar dominant TCR Vβ subsets are identified with the two approaches. Additionally, Immunoscope analysis shows that the complementarity-determining region 3 size distribution of TCR β-chain junctional transcripts within expanded Vβ subsets is pseudogaussian in all superantigen-stimulated cultures, reflecting a high level of polyclonality. This is further confirmed by sequence analysis of TCR β junctional transcripts derived from some expanded TCR Vβ subsets. Taken together, these TCR repertoire studies confirm the superantigenic nature of the new toxins identified in this study.

### EXAMPLE 63

### The Identification and Characterization of the SETs

[1977] See, Williams et al., Infect. Immun. 68: 4407-4414 (2000). A fragment of the set1 gene is initially cloned using a screening method incorporating alkaline phosphatase (PhoA) as a reporter molecule to identify secreted proteins, as previously described for Streptococcus pneumomae. This system utilizes an alkaline phosphatase-negative strain of Escherichia coli CC118 (PhoA−) and plasmid pHRM104, which contains a truncated E. coli phoA gene lacking its signal sequence. Thus, for the secretion of functional alkaline phosphatase activity, genes encoding signal sequences must be cloned in frame with the phoA gene in the reporter system. A 5 ug sample of S. aureus NCTC 6571 genomic DNA is digested with Sau3A, fragments of 1 to 4 kb were ligated to pHRM104 which is linearized with BamHI and the ligations are used to transform E. coli CC118. Transformants exhibiting alkaline phosphatase activity are detected by growth on nutrient agar containing 5-bromo-4-chloro-3-indolylphosphate. Plasmid DNA is prepared from all positive clones, and the sequences of the inserts are determined. One of these clones, pExp5, contains a 237-bp DNA fragment at set1.

[1978] Identification of set: An alkaline phosphatase fusion strategy is employed to identify proteins exported by S. aureus. Using this system, one clone is isolated, pExpS, that contains DNA encoding the N-terminal 79 amino acids of a secreted protein fused to phaA. Comparison of the nucleotide sequence of pExpS with those in the Oklahoma University sequencing project of S. aureus NCTC 8325 (http://www.genome.ou.edu/staph.html) revealshomology (91%) to contig 386 (designation as of July 1998). Contig 386 contains a partial open reading frame encoding a putative 191-amino-acid protein (ORF386), and a search of the SwissProt database reveals that ORF386 has approximately 25% identity to a number of staphylococcal and streptococcal exotoxins. The homology includes two regions that are similar to the consensus staphylococcal enterotoxin/streptococcal exotoxin signatures (PROSITE and PCOC00250) (12, 16). The first of these signatures is a well-conserved region found in the majority of the staphylococcal enterotoxins but not TSST-1, while the second signature is a more diffuse sequence which is present in both the enterotoxins and TSST-1. This similarity suggested that ORF386 codes for a novel exotoxin. The DNA sequence identified in pExpS as encoding an N-terminal fragment (including the signal peptide sequence) of an unknown protein and that of ORF386 are very similar although not identical. The gene within pExpS also encodes a novel exotoxin-like. protein. This open reading frame is designated set1 (for staphylococcal exotoxin-like gene 1).

[1979] Cloning of the full-length set1 gene and identification of the novel set gene cluster: A set1-specific probe (253 bp) is PCR amplified using pExp5 as template DNA and the primer pair 5′-GGGACAGAATAATACTATGAAATTAA AAACG and 5′-ATCTTTTTGGTTAAAGCGTAC. Labeling of the set1 probe DNA with digoxigenin-dUTP (DIG-dUTP), hybridization, and subsequent immunological detection are carried out as specified by the manufacturer (Roche Diagnostics Ltd.). Southern blots of genomic DNA digested with an array of restriction endonuclcascs and probed with the set1 probe reveals that this gene is present on a 5.2-kb EcoRI fragment. Chromosomal DNA is digested with EcoRI and ligated to pUC19. The ligation mix is transformed into E. coli TOP10. Transformants are transferred to Hybond-N membranes (Amersham, Little Chalfont, United Kingdom) and screened for the sel1 gene using the 253-bp set1 probe. One clone, pSETlfi, has a 5.2-kb insert containing the set1 gene. The 5.2-kb insert is sequenced by primer walking using a BigDyc terminator kit as specified; by the manufacturer (ABI Perkin-Elmer). The cycle-sequencing reactions are run on an ABI 310 genetic analyzer. The template is sequenced in both directions in duplicate.

[1980] Cloning of the full-length set1 gene and identification of the novel exotoxin-like gene cluster. The set1 gene is mapped to a 5.2-kb £coRI S. aureus genomic DNA fragment by using a 253-bp probe designed to target the 5′ end of set1 (data not shown). To clone this fragment, a complete S. aureus NCTC 6571 genomic DNA-pUC19 EcoRI library is constructed in E. coli and screened using the 253-bp set1 probe. One positive clone, pSET16, containing a 5,175-bp fragment is used for further analysis. The complete DNA sequence of this 5,175-bp fragment is determined and has been deposited in GenBank (accession no. AF094826). Analysis of the DNA sequence of pSET16 reveal four complete open reading frames together with two partial open reading frames at the 5′ and 3′ extremities of the DNA, A BLAST search of the SwissProt database indicated that the four complete open reading frames and one of the partial open reading frames (5′ end) had homology, although low, to those encoding a number of staphylococcal and streptococcal exotoxins, including TSST-1. The second partial open reading frame at the 3′ extremity encoded the start of a possible host specificity determinant methylase (HsdM)-like protein (54% identity over 26 amino acids to Klebsiella pneumoniae HsdM). The novel exotoxin-like genes are designated set1 to set5 based on the order of their discovery. The organization of the set genes is shown in Williams et al., supra. The distance between each of the set genes varies from 339 to 446 bp, while the shorter intergenic region between set4 and the isdM-like gene is 261 bp. Apart from the set2 gene (for which the upstream region has not been sequenced), all genes are preceded by putative ribosome-binding sites 7 bp upstream of their start codons.

[1981] Computer-aided modeling of protein structures: The SET sequences, excluding SET2, for which we did not have complete sequence data, were modeled against two target proteins, TSST-1 and SPEC, using a Silicon Graphics computer. Coordinate files for SPEC (1 an 8) and TSST-1 (2tss) are downloaded from the Brookhaven Protein Database. MODELLER software is used which optimizes spatial restraints derived from the sequence alignments, to build models of the SET proteins. Protein models thus derived are viewed using MOLSCRIPT. Based on sequence alignments using CLUSTAL_X Windows 1, the SET3 and SET4 sequences are modeled using TSST-1 (2tss.pdb) as template while the SET1 and SETS sequences are modeled using SPEC (1an8.pdb).

[1982] Distribution of the set1 gene among staphylococci.: Staphylococcal strains are screened for set1 by PCR. Chromosomal DNA from S. aureus NCTC 6571, NCTC 8325-4, FRI326, and eight clinical isolates (obtained from Geoffrey Scott, University College London Hospital) and S. epidermidis NCTC 11964 and NCTC 11047 are used as templates. A total of 30 cycles of amplification are performed using the

forward primer
5′-GAATTCAGATTGGGAGAATAATACT ATG and the
reverse primer
5′-AGATCTCAACGTTTCATCGTTAAGCTGC.

[1983] Distribution of the set1 gene among staphylococci.: Ten strains of S. aureus, FRI326, NCTC 8325-4, and eight clinical isolates, together with two strains of S. epidermidis (NCTC 11964 and NCTC 11047) are analyzed by PCR for the presence of the sel1 gene. Products are generated for all of the S. aureus strains but not for either of the S. epidermidis strains (Williams et al., supra). Cloning and sequencing of the sel1 genes from three of the S. aureus strains (FRI326, NCTC 6571, and NCTC 8325-4) reveals that the NCTC 6571 gene has 92 and 88% identity to the FR1326 and NCTC 8325-4 sel1 genes, respectively. The respective GenBank accession numbers for the set1 genes from FRI326, NCTC 8325-4, and NCTC 6571 are AF188836, AF188837, and AF188835. The predicted protein sequences differ in 30 (FRI326) and 34 (NCTC 8325-4) positions from the NCTC 6571 SET1 sequence, corresponding to 87 and 84% identity, respectively, at the amino acid level.

[1984] Dot blot analysis of set1 mRNA production.: Overnight cultures of S. aureus grown in 1% casein hydrolysate-2.5% yeast extract are diluted (1:50) in fresh broth and incubated at 37° C. with aeration. Aliquots are taken at various time points, and the cells are harvested and washed with 0.5% Twccn 80. The cell pellets are suspended in 0.5 ml of lysis solution (consisting of 9.6 ml of Divolab no. 1 detergent [DiversyLever Ltd.], 24 ml of 500 mM sodium acetate [pH 4], 66.4 ml of distilled water), 0.5 ml of acid-phenol (pH 4), and 0.1 ml of chloroform-isoamyl alcohol (24:1) and lysed using a Ribolyser (Hybaid). After a 10-min incubation on ice followed by ccntrifugation, the supernatants are extracted with phenol-chloroform and the RNA is precipitated. RNA (2 μg) is blotted onto a nylon membrane and probed using a DIG-labeled set1 probe. The hybridization and subsequent chemiluminescent detection are carried out as specified by the manufacturer (Roche Diagnostics Ltd.).

[1985] Dot blot analysis of set1 mRNA production.: To determine if set1 is expressed in S. aureus, total cellular RNA extracted at various growth stages from S. aureus NCTC 6571 is probed with a probe specific to set1. The expression of set1 is growth phase dependent, with the highest level of expression in the stationary phase.

[1986] Cloning and expression of set1.: The set1 gene encoding the mature protein minus the signal peptide is PCR amplified from pSET16 DNA and inserted into the pQE30 N-terminal histidine tag fusion vector. This construct is introduced into E. coli JM109. Protein production is found to be most efficient when bacteria are grown at 28° C. after induction (data not shown), giving yields of approximately 20 mg of soluble protein per liter. Analysis of SET1 by gel filtration chromatog-raphy reveals that it exists as a monomeric protein of about 23 to 24 kDa. The set1 genes from NCTC 8325-4 and FRD26 arealso cloned and expressed using this system and found to encode monomeric proteins with molecular masses identical to that of SET1 from NCTC 6571. All rSET proteins are homogenous as determined by sodium dodecyl sulfate-polyacryl-amide gel electrophoresis and migrate with molecular masses of about 23 to 24 kDa.

[1987] Cloning of set1 into an N-terminal polyhistidine expression vector.: The oligonuclcotide 5′-GGATCCGCAGAAAAACAAGAGAGAGTAC and 5′-GTCGACAACGTTTCAf CG-TTAAGCTGCC are designed to amplify the 677-bp set1 gene minus the DNA encoding the N-terminal signal peptide and also contained recognition sequences for the restriction enzymes BamHI and SalI (underlined), respectively. The PCR fragment is initially cloned into PCR2.1-TOPO and transformed into TOP10 (Invitrogen, Leek, The Netherlands). The set1 gene is extracted from PCR2.1-TOPO on a BamHI-SalI fragment and ligated to BamHI-SalI digested pQE30 (Qiagen Ltd., Crawley, United Kingdom). The ligation mix is transformed into E. coli JM109(pREP4), and transformants are selected by growth at 30° C. on Luria-Bertani agar containing 100 μg of ampicillin per ml and 25 μg of kanamycin per ml.

[1988] Expression at set1 and purification of recombinant SET1.: For gene expression, positive clones aregrown overnight in Terrific broth, diluted 1:25 in fresh broth, and incubated for a further 1 h at 37° C. Gene expression is induced with 1 mM isopropyl-p-D-thiogalactopyranosidc (IPTG) for 4 h at 28° C. Cells are harvested by centrifugation at 6,000×g for 30 min and then resuspended and lysed for 20 min in B-PER protein extraction reagent (Pierce & Warriner Ltd.) containing 20 mM imidazole, 1.5 μM phenylmethylsulfonyl fluoride, 1 μM pepstatin, and 10 μM leupeptin. Lysates are clarified by centrifugation at 23,000×g for 15 min. Recombinant proteins are purified using Ni-nitrilotriacetic acid-agarose columns under native conditions as specified by the manufacturer (Qiagen Ltd.), except that after the lysates are loaded onto the column, an additional column wash, consisting of 2.5 mg of polymyjtin B per ml in wash buffer, is performed to remove contamination with lipopolysaccharide. Finally, recombinant SET1 (rSET1) is further purified by gel filtration chromatography using a Superdex75 column precquilibrated in phosphate-buffered saline and attached to a Pharmacia SMART system (Amersham-Pharmacia Biotech).

[1989] Assay of cytokine production by PBMCs.: PBMCs are prepared as previously described. Cells are plated at a density of 2 X 106 cells/ml in 24-well plates and stimulated with graded concentrations of protein. SEB (Sigma-Aldrich Ltd.) is used as a positive control. Cell supernatants are assayed for the presence of interleukin-1β (IL-1β), IL-6, and tumor necrosis factor alpha (TNF-α) using two-site enzyme-linked immunosorbent assays as previously described.

[1990] Capacity of rSET1 to stimulate production of the proinflammatory cytokines IL-1β, IL-6, and TNFα: All characterized staphylococcal enterotoxins are able to stimulate proinflammatory cytokines. The ability of rSET1 from strain NCTC 6571 to stimulate the production of the cytokines IL-1β, IL-6 and TNF-α by PBMCs is compared to that of SEE. To establish the purity and to ensure that similar concentrations of each protein preparation are used, rSET1 and commercial SEE are compared by sodium dodecyl sulfate-polyacrylamide gel electrophoresis. Stimulation of PBMCs with rSET1 results in the production of all three of the proinflammatory cytokines tested (Williams et al., supra). rSET1 stimulates the secretion of IL-6 by PBMCs over the dose range of 100 ng/ml to 10 μg/ml, compared to SEB, which is active at inducing IL-6 production over the dose range of 10 ng/ml to 10 μg/ml. However, the maximal levels of IL-6 produced in response to rSET1 are almost 10-fold greater than those induced by SEB. Heating of rSET1 at 100° C. for 20 min reduces its ability to stimulate IL-6 production by 69%. SEB is a very poor inducer of IL-1β secretion by PBMCs. rSET1, on the other hand, shows a similar dose response to that produced for IL-6 secretion, being active over the range of 100 ng/ml to 10 μg/ml. The maximal level of IL-1β produced by PBMCs stimulated with rSET1 is, again, almost 10-fold greater than that induced by SEB. rSET1 is not a potent inducer of TNF-α secretion, being active only over the concentration range from 1 to 10 μg/ml. In contrast, SEB was a potent inducer of TNF-α secretion by PBMCs, having activity over the dose range of 1 ng/ml to 10 μg/ml. Once again, the maximum level of cytokine secretion is produced in response to rSET1 and not to SEB; however, the levels are only slightly higher.

[1991] The nuclcotide sequence data reported here have been deposited in the GenBank database under accession numbers AF094826 (set gene duster fragment), AF188835 (NCTC 6571 set1 gene), AF188836 (FRI326 set1gene), and AF188837 (NCTC 8325-4 set1 gene).

### EXAMPLE 64

### Isolation and Characterization of SPEB

[1992] SPEB by Purification of native SpeB from strain MGAS 1719 is given by Gubba S et al., Infect. Immun. 66: 765-770 (1998). Native 28-kDa SpeB protease was purified from the culture supernatant of strain MGAS 1719 as described previously (14). The purified protein is >95% pure, as analyzed by SDS-PAGE and staining with Coomassie brilliant blue. Amino-temtinal sequencing of recombinant proteins. A 20 pg aliquot of each recombinant protein with the His tag removed by digestion with rTEV protease is analyzed by SDS-PAGE, transferred to a Problott membrane (Applied Biosystems, Foster City, Calif.), and stained with Coomassie brilliant blue. The desired protein band is excised and analyzed with an Applied Biosystems model 473A protein sequencer located at the Baylor College of Medicine Core Protein Facility.

[1993] Construction of the speB C192S mutant is given by Musser J et al, Infect. Immun. 64: 1913-1917 (1996). The speB gene is amplified from S. pyogenes MGAS 1719, a strain that contains the speB7 allele (24), and the PCR fragment is doned into the pCR-Script vector (Stratagene, La Jolla, Calif.). The oligonucleotides used in PCR amplification corresponds to positions −160 to −138 (primer SPEBX) and 1303 to 1325 (primer SPEB2) of a published yeB gene sequence. The 30-ul PCR mixture contained 1 μg of MGAS 1719 genomic DNA, 50 mM KC1, 10 mM Tris-HCl (pH 8.5), 1 mM Mg²⁺, 200 μM each deoxynudeoside triphosphate, 2 μM each primer, and 2.5 U of Pfu DNA polymerase. Amplification is performed in a Perkin-Elmer Cetus model 480 thermocyder, with the following parameters: 30 cycles of denaturation at 94° C. for 1 min, annealing at 55° C. for 1 min, and extension at 72° C. for 1.5 min. A 1.5-kb amplification fragment is cloned into pCR-Script, and plasmid DNAs obtained from Escherichia coli transformants are characterized by automated DNA sequencing (24) to verify that no mutations occurred in the inserted speB gene.

[1994] One clone (pSEB1719) with the same nudeotide sequence from positions −155 to 1325 as the speB7 allele is chosen for use in mutagenesis. A PCR-based mutagenesis procedure is used to generate a C-192 (TGT)-to-S-192 (AGT) substitution. The sense-strand primer (TGT2) has the sequence CAG GAAGTGTTGCTACTGCAA, and the sequence of the antisense-strand primer (TGT1) is CAACACTTCCTGTAGCTGCATG. Separate PCRs are done with primers TGT2 and SPEB2 in one reaction and primers TGT1 and SPEBX in a second reaction. These reactions are carried out with 1 ng of plasmid pSEB1719 and the PCR conditions described above except that primer annealing is done at 40° C. for 1 min. As expected, two DNA fragments (740 and 757 bp) are generated by the reactions. Following agarose gel electrophoresis, these fragments are recovered and pooled, and 1 μg of the mixture is used in a second round of PCR amplification with primers SPEBX and SPEB2 and an annealing temperature of 55° C. A resulting 1.5-kb full-length speb gene is then cloned into pCR-Script. Screening of plasmids from 183 colonies by agarose gel electrophoresis identified five organisms with appropriately sized inserts. The target region was sequenced in these five clones, and one (pSEBC2S) that has the desired TGT->AGT (C192S) substitution is identified. The 1.5-kb insert is then sequenced in its entirety by an automated strategy (24), and no additional nudeotide substitutions are identified.

[1995] Expression and purification of recombinant proteins is given by Gubba et al. supra 1998 Recombinant proteins are obtained from E. coli BL21 containing the appropriate plasmids after induction with isopropyl-p-o-thiogalactopyranoside (IPTC). Cells are grown overnight at 30° C., diluted 1:10 in Luria-Bertani medium supplemented with 100 μg of ampicillin per ml, and cultured to an optical density at 590 nm of 0.5 to 1.0. IPTG is added (final concentration, 0.6 mM), and the cells are grown for an additional 2 to 6 h. After centrifugation at 10,000×g for 10 min, the supernatant is discarded and the cell pellet is stored at −70° C. The cells are resus-pended in 5 volumes of 50 mM Tris-HCl (pH 85) containing 10 mM 2-mercaptoethanol and 1 mM phenylmethylsulfonyl fluoride and lysed by sonication with three 20-s pulses generated by a Sonifier Cell Disrupter 250 (Branson, Danbury, Conn.). After each 20-s burst, the cells are cooled for 5 min in a wet-ice bath. Cell wall debris is removed by centrifugation at 10,000×g for 10 min, and the supernatant is applied to a 1- to 5-ml column of Ni-nitrilotriacetic acid resin (Qiagen, Chatsworth, Calif.) equilibrated by being washed with 5 volumes of buffer A (20 mM Tris-HCl pH 8.51, 100 mM KCl, 20 mM imidazole, 10 mM 2-mercaptoethanot, 10% [vol/vol] glycerol). The column was washed with 10 volumes of buffer A, 2 volumes of buffer B (20 mM Tris-HCl pH 8.51, 1 M KCl, 10 mM 2-mercaptoethanoL 10% [vol/vol] glycerol), and 2 volumes of buffer A to remove unbound protein. Recombinant protein containing the His tag is eluted from the column by washing with 5 volumes of buffer C (20 mM Tris-HCl [pH 8.5], 100 mM KCl. 100 mM imidazole, 10 mM 2-mercaptoethanol, 10% [vol/vol] glycerol). Recombinant proteins without the His tag are purified after direct cleavage of the His tag from the column-bound protein by treatment with approximately 1,000 U of recombinant tobacco etch virus (rTEV) protease per 3 mg of bound fusion protein. When this procedure is used, the rTEV protease is added to 5 ml of buffer A supplemented with 1 mM dithiothreitol and 0.5 mM EDTA and digestion is conducted for 2 h at 30° C. on a shaking platform. The recovered proteins are concentrated to 0.5 ml with Centrisep 3 or Centrisep 10 concentrators (Amicon, Beverty, Mass.), reconstituted to 3.0 ml with phosphate-buffered saline (PBS), and desalted either with desalting columns (Econopac 10 DG columns; Bio-Rad) or by dialysis against PBS with Slide-A-Lyser cassettes (Pierce, Rockford, Ill.). The concentration of the purified protein is estimated by a protein assay (Pierce), and the material is stored at 4° C. The purity of recombinant proteins is estimated by silver staining after sodium dodecyl sulfate-potyacrylamide gel electrophoresis (SDS-PAGE).

### EXAMPLE 65

### Identification and Characterization of Yersinia Superantigen

[1996] Bacterial strains, plasmids, and bacteriophage are given in Miyoshi-Akiyama T et al., J. Immunol. 154: 5228-5234 (1995). Y. pseudotuberculosis CYP86-15, serotype 4b, isolated from a patient in the mass outbreak of Y. pseudotuberculosis infection in Chiba prefecture in 1986, is used to prepare YPM and construct a genomic library. XEMBL3 phage vector DNA and the host strain, Escherichia coli XL1-Blue MRA (P2), are purchased from Stratagene (La Jolla, Calif.). E. coli DH10B is purchased from Life Technologies (Gaithersburg, Md.) and used as the host strain for pUC19 and pMW119 plasmid vectors. The λ-in vitro packaging mixture is purchased from Amersham International (Bucks, U.K.) Nippon Gene Co. (Tokyo, Japan). The low copy plasmid pMW119 is purchased from Nippon Gene Co. (Tokyo, Japan).

[1997] Purification of YPM is given in Miyoshi-Akiyama Tet al., supra. Briefly, Y. pseudotuberculosis strain 86-15, serotype 4b, isolated from a patient in a mass outbreak of Y. pseudotuberculosis infection in Shisui Town, Chiba Prefecture, Japan, in March 1986 (4), is provided by Dr. Kenji Koiwai, Chiba Institute of Health Science, Chiba, Japan, and used for YPM purification. The bacteria are grown in 20 liters of brain heart infusion broth for 18 h at 27° C. (yields 20 g wet weight/culture). Twenty grams of the bacteria are suspended in 200 ml of PBS (pH 7.2) and ultrasonicated. The supernatant of the suspension of disrupted cells is depleted of nucleic acids by streptomycin treatment and of unprecipitated substances by precipitation with 100% saturated ammonium sulfate. The precipitated mitogenically active fraction in the ammonium sulfate saturation is serially chromatographed on DEAE-Sepharose, Sephacryl S-100 HR, and TSK-gel G2000SW HPLC system (Tosoh Corp., Tokyo, Japan). In SDS-PAGE analysis, the sample obtained after chromatography on TSK-gel G2000SW HPLC system migrate as a single band at a m.w. of 21 kDa. The total amount of YPM, recovered is about 100 to 200 μg from 20 g of wet bacteria.

[1998] Cloning and sequencing of the DNA fragment encoding the 30 amino acid residues of the N-terminal region of YPM are given in Miyoshi-Akiyama T et al., supra. The 30 amino acid residues of the N-terminal region of YPM (T[I or D]YDNTLNSIPSLRIPN1ATYTGTIOGKGE) are determined by commercial services. In the second residue of the N-terminal amino acid sequence, aspartic acid [D] is identified in one analysis and isoleucine [I] in two analyses. Based on the sequence including isoleucine in the second residue, two degenerate oligonucleotides (Primers used are given in Table I of Miyoshi-Akiyama, T. et al., J. Immunol. 154: 5228-5234 (1995)) deduced from both sides of the 30 residues of the N terminus of YPM are synthesized to amplify the DNA fragment encoding the YPM N terminus using the PCR method.

[1999] Genomic DNA from Y. pseudotuberculosis CYP 86-15 is isolated according to the procedures described previously. The DNA was denatured for 5 min in a boiling bath and used as the template DNA for PCR. The PCR was run in 50-μl reaction mixtures containing 300 ng/ml template, 0.2 ng/ml RNase, 0.5 mM deoxynucleoside triphosphate mixture, 4 nM PCR primer 1.1 nM PCR primer 2, and 40 U/ml Vent DNA polymerase (New England Biolabs, Beverly, Mass.) using a DNA Thermal cyclar 480 (Perkin-Elmer, Norwalk, Conn.). The reaction mixtures are overlaid with 50 μl of mineral oil. The PCR are subjected to the following reaction conditions: 40 cycles of a combination of 30 s at 95° C., 30 s at 25° C., and 1 min at 55° C./cycle. The PCR products obtained are purified by pheniol-chloroform extraction and applied to PAGE (10% gel). The 90-base pair (bp) fragment encoding the 30 residues of the N terminus of YPM is excised from the gel and phosphorylated by T4 polynucleotide kinase, then ligated into the SmaI site of pUC19 to obtain plasmid pUC-YPM-N90.

[2000] DNA sequencing of the gene encoding the 30 residues of the N terminus of YPM is performed by the method of Sangar et al., Proc. Natl. Acad. Sci. 12: 5436-5442 (1977) using an ABI 377A DNA sequencer system (Applied Biosystems Japan, Tokyo, Japan) with AmpliTaq (Amersham International) and PRISM ready reaction dye primer cycle sequencing kit M13 Rev. (Applied Biosystems Japan). On the basis of the DNA sequence, digoxigenine-labeled probe (DIG-labeled oligonucleotide probe in Table I) is synthesized and used as the probe for screening the genomic library of Y. pseudotuberculosis.

[2001] Construction and screening of a genomic library of Y. pseudotuberculosis is given in Miyoshi-Akiyama T et al., supra. Total genomic DNA of Y. pseudotuberculosis is partially digested with BamHI, and the resulting DNA fragments are ligated into λEMBL3/BamHI arms and packaged into the λ phage particle. The mixture of the phage derivatives and E. coli XL1-Blue MRA(P2) in L soft agar containing 0.2% maltose and 10 mM MgSO4 is plated on L broth agar plates, and the plates are incubated overnight at 37° C. Grown plaques aretransferred to Hybond N+ filters (Amersham International) and screened with the DIG-labeled oligonucleotide probe by the plaque hybridization method using a DIG Nucleic Acid Detection Kit (Boehringer Mannheim, Indianapolis, Ind.). Phage plaques showing positive hybridization are picked, mixed with E. coli XL1-Blue MRA(P2) in a ratio of 10:1, and cultured overnight. The recombinant phage DNA is prepared from the culture supernatants using polyethylene glycol and used in the following subcloning experiment.

[2002] Subcloning and sequencing of the gene coding YPM is given in Miyoshi-Akiyama et al., supra.

[2003] The DNA preparations from the recombinant phages are digested with SalI and ligated into the same site of pMW119. The recombinant pMW119, pMW-YPM, is introduced into E. coli DH10B. The pMW-YPM DNA is purified from the E. coli cells and used as template for DNA sequencing. DNA sequencing experiments are performed using a Shimadzu DNA sequencer DSQ-1 system (Shimadzu Co., Kyoto, Japan) with Sequenase Ver. 2.0 (Amersham International pic.) and synthetic oligonucleotide primers (Sequence primers 1-7 in Table I). The sequence data obtained are analyzed by the GENETYX-Mac program (SDC, Tokyo, Japan).YPM

[2004] E. coli DH10B carrying the pMW-YPM is cultured overnight at 37° C. Tween 80 (0.1%) is added to the culture supernatant obtained, and this is applied to an anti-YPM polyclonal rabbit Ab-conjugated Sepharose column (1.6×3 cm) equilibrated with PBS (pH 7.2) containing 0.1% Tween 80. The elution is performed using 0.1 M glycine-Cl (pH 2.7). The eluted fractions are neutralized, pooled, desalted, concentrated, and examined for biologic properties as YPM.

[2005] Biologic Assays

[2006] Lymphoid cells and L cells.: In brief, human PBMC are obtained from peripheral blood of healthy donors by Ficoll-Conray density gradient centrifugation. T cell-enriched human PBMC are obtained by the S-2-aminoethylisothiouronium-treated SRBC rosette method as a rosette-forming cell fraction. T cells are obtained by treatment with the rosette-forming cell fraction with a combination of mAb to HLA-DR (12C3) and nontoxic rabbit serum. L cells transfected with HLA-DR4 genes (8124), L cells transfected with DQw1 genes (LAQ8251), L cells transfected with DP(Cp63) genes (LAP4108), and control L cells (8400) are used as AC in T cell activation. L cells are treated with 50 μg/ml mitomycin C at 37° C. for 30 min and irradiated (3500 rad) before use. Assays of T cell responses.

[2007] Assays for YPM-induced T cell responses: In brief, in the assay for IL-2 activity, whole human PBMC arestimulated with mitogens, and the culture supernatants are examined for IL-2 activity using IL-2-dependent CTLL-2 cells. For examination of the requirement of MHC class II molecules on AC in T cell activation, T cells from human PBMC are stimulated with mitogens in the presence or absence of HLA class II+ L cells or control L cells. The culture supernatants are assayed for IL-2 activity.

[2008] PCR method for determining TCR-Vβ usage.: Determination of TCR-Vβ selectivity of human T cells stimulated by the cloned YPM is performed by the reverse transcription-PCR method. In brief, human PBMC are stimulated with several preparations of YPM or anti-CD3 mAb, and the T cell blasts collected are expanded with IL-2 for 2 days. Samples of cDNA synthesized by incubating total mRNA obtained from T cell samples with reverse transcriptase are amplified by the PCR method using 22 5′ Vβ-specific sense primers and 3′ Cβ-specific antisense primer end-labeled with ³²P. TCR Cα cDNA as an internal control was co-amplified in parallel. The amplified products are separated by electrophoresis on 2.5% agarose gel and examined for radioactivity by autoradiography and the GS-250 Molecular Imager System (Nippon Bio-Rad Laboratories, Tokyo, Japan). Radioactivities in the Vβ band are normalized to the Ca band as the Vβ:Cα ratio.

### EXAMPLE 66

### Superantigen DNA Delivered to Tumor Cells as Immunoconjugates

[2009] Cloning, expression, purification, and characterization of ScFv and ScFv-protamine proteins carried out by the method of Li et al Cancer Gene therapy 8: 555-565 (2001). The anti-ErbB2 ML39 ScFv gene sequence is removed from pSyn-1 ML3920 and cloned into pAcGP67B baculo-virus transfer vector at restriction sites NcoI and NotI to allow secretion of the ScFv and ScFv fusion proteins into the medium. A six-His tail is also engineered at the C-terminus of the peptide to facilitate purification. The full-length human protamine sequence is described previously. The sequence for the truncated form of human protamine comprising amino acids 8 through 29 is as follows: RSQSRSRYYRQRQRSRRRRRRS. The sequence is placed downstream of the ML39 ScFv, with a His 6×6 tail at the C-terminus. Recombinant baculovirus is generated by using the BaculoGold system from Pharmingen (San Diego, Calif.).

[2010] To isolate recombinant proteins from culture supernatants, supernatants from SF21 cell cultures infected with the recombinant viruses are collected by centrifugation at 2000 rpm for 20 minutes at 4° C. The proteins are precipitated by addition of equal volume of saturated ammonium sulfate to the harvested culture supernatant, followed by incubation of the mixture at 4° C. overnight. The proteins are then pelleted by centrifugation at 10,000×g for 30 minutes at 4° C. The resulting pellets are resuspended in phosphate-buffered saline (PBS)/10% glycerol, followed by extensive dialysis with 5% glycerol/PBS. The dialyzed protein preparations are then applied to a Probound nickel-chelating column (Invitrogen, San Diego, Calif.). Recombinant ScFv proteins are purified under native condition using increasing concentrations of imidazole in the elution buffer. The collected protein fractions are then analyzed for purity using sodium dodecyl sulfate polyacrylamide gel electro-phoresis (SDS-PAGE) and Western blot. The purified proteins are dialyzed against PBS plus 5% glycerol to remove imidazole.

[2011] To isolate protein from cellular extracts, cells are dissolved in 6 M guanidine hydrochloride (GuaHCl) for 30 minutes on ice, followed by brief ultrasonication. Insoluble cellular debris is then removed by centritugation at 12,000×g for 30 minutes at 4° C. The resulting protein preparations are then applied to a Probound column (Invitrogen, Carlsbad, Calif.) under denaturing conditions (6 M GuaHCl). Recombinant proteins are then eluted by increasing concentrations of imidazole in the presence of 6 M GuaHCl. The eluted proteins are refolded using methods previously described with slight modifications. Briefly, the samples are first dialyzed against Buffer I, which consists of PBS containing linear decreasing concentrations of GuaHCl (from 6 to 0 M) generated by a gradient maker (Fisher Scientific, Atlanta, Ga.) over a period of 48-72 hours, followed by dialysis against Buffer II, which consists of 5% glycerol, 0.5 M arginine, 1 mM EGTA, and 1 mM glutathione in reduced and oxidized form at 4° C. for 48 hours. Afterwards, the buffer is changed to PBS/5% glycerol by dialysis. Finally, the protein preparations are concentrated and stored at 4° C. with 0.005% sodium azide, or aliquoted and frozen at −70° C.

[2012] Flow cytometry: To determine binding of ScFv to the ErbB2 molecules, we use ErbB2(+) cells (SKBR3) and ErbB2(−) cells (MCF7) in a flow cytometry assay. Briefly, the cells are first detached from the bottom of tissue culture dishes by using a mild method for protection of the cell surface proteins, i.e., incubation of the cells in enzyme-free cell dissociation buffer (Life Technologies, Rockville, Md.) for 20 minutes, followed by washing with PBS containing 5% PCS. The cell suspension is then incubated with ScFv (2 μg/mL for 10⁶ cells) for 30 minutes on ice. The cells are then washed 3× with PBS/5% PCS, followed by further incubation with murine anti-His tag monoclonal antibody (Babco, Berkeley, Calif.). Finally, the cells are washed 3× with PBS/5% PCS prior to a 30-minute incubation with FITC-conjugated goat antimouse IgG. The reaction is terminated by three additional washes with PBS/5% PCS and fixed in 2% formaldehyde/PBS. Positive cells are scored by FACS analysis.

[2013] SEA DNA Binding to Protamine-Fab fusion proteins: The SEA DNA binding to the antiERB2-protamine fusion protein is examined by a gel-shift assay. When increasing amounts of the fusion protein are mixed with the radiolabeled DNA fragments or whole plasmid DNA decreasing amounts of DNA fragments or whole plasmid DNA migrated into the agarose gels and the DNA entering the agarose gels migrated more slowly. In contrast, the DNA incubated with the antiERB2 protein alone show no significant change of its mobility in the agarose gels. The binding activity of the fusion protein to tumor cell surface after it was coupled with DNA is further examined by fluorescence activated cell sorting (FACS) in which the anti-ERB2-protamine-DNA complexes showed positive staining. Thus, the protamine fusion protein maintains binding activity to tumor cells when coupled with SEA DNA molecules.

[2014] Construction and expression of superantigen: The encoding gene of SEA is chosen for the mammalian toxin expression vectors due to the accumulated knowledge of the encoding gene sequence-function relationships. The gene is placed under the control of CMV and T7 promoters. These constructs allow expression of the toxin by transfected tumor cells. When the SEA expressors are transfected into mammalian tumor cells using lipofectin,22 SEA is produced and detected in the media.

[2015] Selective secretion of SEA by Tumor Cells Targeted by fusion protein-Superantigen DNA complexes: To investigate whether anti-ERB2-protamine fusion protein can transfer the toxin expresser into tumor cells, the purified anti-ERB2 Fv-protamine protein is incubated with pCMV-SEA plasmid DNA at a ratio of 2:1 (determined by titration) in 0.2 M NaCl solution to form fusion protein-DNA complexes. The target tumor cells are incubated with the anti-ERB2-Fv-protamine-SEA expressor complexes, SEA expresser alone or Fv-protamine fusion protein alone. After 48 h of incubation, SEA activity in the culture cells areexamined. After incubation with the anti-ERB2-Fv-protamine-toxin expresser complexes for 48 h, the target tumor cells show a significant secretion of superantigen SEA.

[2016] DNAse protection assay: Protection of SEA DNA by protein and/or lipid is performed by treating the complex with excessive amount of DNase (40-80 U of DNase I per microgram of DNA). After incubation at 37° C. for 2 hours, the reaction mixture is then added with SDS to final concentration of 1% and Proteinase K at 1 mg/mL, followed by incubation at 37° C. for 2 hours. The mixture is then twice extracted with phenol/chloroform for isolation of DNA fragments. The aqueous phase containing the DNA fragments following extraction is then analyzed by ethidium bromide staining of 1% agarose gel and photographed under UV light

[2017] Preparation of Superantigen-DNA-oligolysine-RGD-Complexes:

[2018] This is carried out by the method of Harbottle R P et al., Human Gene Therapy 9: 1037-1047 (1998). American firefly (Photinus pyralis) luciferase under the control of a simian virus 40 (SV40) promoter and enhancer in the vector pGL3 (Promega, Madison, Wis.) are used as a reporter gene. Plasmid SEA or SEB DNA is purified using Qiagen (Chatsworth, Calif.) columns and the endotoxin extraction kit after alkaline lysis of cells pelleted from overnight cultures of Escherichia coli DH5or. DNA-[K]₁₆RGD complexes are prepared in microcentrifuge tubes by the addition of 0.2 μg of plasmid DNA to serial dilutions of peptide in 20 μl of OptiMem (GffiCO-BRL) or HBS. The mixtures are vortexed and incubated at room temperature for 30 min before the complexes are analyzed on 0.8% agarose gels.

[2019] Oligolysine peptide synthesis and chemical characterization: Peptide synthesis is performed on an Applied Biosystems. Inc. (ABI. Foster City. Calif.) solid-phase batch peptide synthesizer (model 431 A) using a 200-400 mesh p-benzyloxybenzyl alcohol (HMP) resin (Novabiochem. San Diego, Calif.). High-performance liquid chromatography (HPLC) is performed using a Gilson HPLC system composed of two solvent delivery pumps (model 306 v 1.0). a manual-Rheodyne injection valve (77251). and a variable-wavelength detector (model 118). Mass spectrometric analysis of the peptide is performed using a LASERMAT 2000 matrix-assisted laser desorption/ionization-time of flight (MALDITOF) mass spectrometer (Thermobioanalysis. San Jose. Calif.). Amino acid composition analyses are performed using an ABI amino acid analyzer (model 420A) with on-line PTC-amino acid detection. Sequence analyses are carried out using an ABI protein/peptide sequencer (model 477A) with on-line PTH analyzer (model 120A) and data analysis system (model 610A).

[2020] The peptide N—[K]₁₆GGCRGDMFGCA ([K]₁₆RGD) is synthesized on a small scale (0.1 mmol), using the standard fluorenylmethoxycarbonyl (FMOC)-amino acid-coupling protocol but with sequential benzoic anhydride capping steps during the generation of the N-terminal hexadeca-L-lysine sequence. Once the synthesis is concluded, the peptide is cleaved from the resin using a trifluoroacetic acid (TFA) solution (7 ml) containing the following scavengers: phenol (7% w/v), thioanisole (4%, v/v), and ethanedithiol (2%, v/v). The peptide is precipitated using ice-cold methyl/-butyl ether (MTBE) and pelleted by centrifugation. The pellet is then washed repeatedly with MTBE and dried in vacua. This dried pellet is dissolved in a minimum volume of aqueous TFA (0.1%, v/v), and then applied to a P2 BioGel gel-filtration column (2×28 cm) (Bio-Rad Laboratories, Hercules, Calif.). The column is eluted with aqueous TFA (0.1%, v/v) at a flow rate of 0.5 ml/min and the eluant monitored at 223 nm. Salt-free peptide-containing fractions are then combined and freeze dried, giving the crude peptide (10 mg). This crude peptide is then dissolved in aqueous acetic acid (7%, v/v; 160 ml) and the solution buffered to pH 6.0 with aqueous ammonia solution.

[2021] Dimethyl sulfoxide is added (20% [v/v] final concentration) and the solution stirred at ambient temperature for 24 hr. Following fivefold dilution in water, the crude cyclized peptide is applied to a reversed-phase C₁₈ Nova-Pak HPLC column (2.5×10 cm, ⁶-μη particle size) (Waters-Millipore, Bedford, Mass.) previously equilibrated with aqueous TFA (0.1%, v/v) (buffer A), and then eluted with a linear gradient (125 ml) of 0-80% buffer B, which is composed of TFA (0.1%, v/v) in acetonitrile. Fractions are collected at a flow rate of 5 ml/min and elution is monitored at 223 nm. Fractions containing peptide eluting at 41% buffer B are combined and freeze dried to give a lyophilized powder (7.1 mg). By matrix-assisted laser desorption/ionization-time of flight (MALDITOF) mass spectrometry, using an acetonitrile-methanol matrix containing 33 mM a-cyano-4-hydroxycinnamic acid (α-CHC), an [M+H]+ molecular ion is observed at 3123.3 m/z. The mass calculated from the empirical formula, C₁₄H₆₃N₁₄O₁₄S₃, is expected to be 1072.2 m/z. The amino acid composition of purified cyclized peptide is checked by amino acid analysis. A sample of the peptide was then dissolved in 50 mM Tris-HCl, pH 9.0, containing acetonitrile (10%, v/v) and digested with endoproteinase LysC (Wako Bioproducts, Wako, Tex.) for 16 hr at ambient temperature. The digest is then subjected to amino acid sequencing and analysis by MALDITOF mass spectrometry. An ion is observed at 1072.2 m/z. The mass calculated from the empirical formula of the RGD domain, is expected to be 1072.2 m/z.

[2022] Transfection of Tumor Cells with Adenoviral Vectors encoding Superantigen and: ttenuated Factor VII: This is carried out by the method of Zhiwei H et al., Proc. Natl. Acad. Sci. 97: 9221-9225 (2000); Zhiwei H et al., Proc. Natl. Acad. Sci. 96: 8161-8166 (1999).

[2023] Cell Lines: LXCSN are TF are human melanoma lines. B16F10 is a mouse melanoma line. The culture medium is DMEM+10% FBS for all of the tumor lines.

[2024] Preparation of the Immunoconjugates: The procedures involves transfecting the expression vector pcDNAS.1 (Invitrogen) into CHO cells or the expression vector pMK33/pMtHy (gift from M. Koelle, Yale University) into Drosphila cells; each vector carried a cDNA encoding a secreted immunoconjugate. The cDNAs for the SEA or SEB superantigen are prepared by the method of Dow S W et al., J. Clin. Invest. 101:2406-2414 (1998) is used. The genes for SEA and SEB are obtained from Dr. John Kappler (National Jewish Hospital), and the gene for TSST-1 is obtained from Dr. Brian Kotzin (National Jewish Hospital). After PCR amplification, all three genes are subcloned into a eukaryotic expression vector (PCR3; Invitrogen Corp., San Diego, Calif.). The primers used for cloning

The application's sequence listing, which the Patent Office published only in electronic form, follows.

SEQUENCE LISTING (224 sequences)

SEQ ID NO: 1 - DNA, 24 bp, Unknown
  Primer
ggcgtcgacatgtataagagatta

SEQ ID NO: 2 - DNA, 24 bp, Unknown
  Primer
gccggatcctcactttttctttgt

SEQ ID NO: 3 - DNA, 1443 bp, Staphylococcus aureus
  CDS (262)..(1032)
ccaaaataatggcaagtactccgttgtcaataccaagtaagtaagatatctgaaatgtataatagagtaaaaatgaaatctttttattatattatagacaagtataaaaaaggtatagtaatatatgtatgtataagtaaataatgataattctataattattgtatataactaataattacttcgacaaaaataatctattatccaaatattttagataataaaaagtttgtatggaattatgctttagaggtgagcaaaatgaaaaaaacagcatttatactacttttattcattgccctaacgtggacaacaagtccacttgtaaatggtagcgagaaaagcgaagaaataaatgaaaaagatttgcgaaaaaagtctgaattgcagggagcagctttaggcaatcttaaacaaatctattattacaatgaaaaagctaaaactgaaaataaagagagtcacgatcaatttttacagcatactatattgtttaaaggcttttttacaaatcattcatggtataacgatttattagtagattttgattcaaaggatattgttgataaatataaagggaaaaaagtagacttatatggtgcttattatggttatcaatgtgcgggtggtacaccaaacaaaacagcttgcatgtatggtggtgtaacgttacatgataataatcgattgaccgaagagaaaaaagtgccgatcaatttatggctagacggtaaacaaaatacagtacctttggaaacggttaaaacgaataagaaaaatgtaactgttcaggagttggatcttcaagcaagacgttatttacaggaaaaatataatttatataactctgatgtttttgatgggaaggttcagaggggattaatcgtgtttcatacttctacagaaccttcggttaattacgatttatttggtgctcaaggacagaattcaaatacactattaagaatatatagagataataaaacgattaactctgaaaacatgcatattgatatatatttatatacaagttaaacatggtagttttgaacacgtaatgttcagattattatgaaccgagaataatctgaaagtttacaagcagtaaaaaaagtatatgtgctataatatgctttgagcaagttggatagatggtggctatctgagtataaggaggtggtgcctatggtggcattactgaaatctttagaaaggagacgcctaatgattacaattagtaccaatgttgcagtttggtttattccttattgcattgataggtctagtaatcaagcttattgaattaagcaataaaaaataaccatcgctaactttggctggtttcgatggttaaatggttattaatttaatctttaatctaaaatagccaccgtctttttaacgggctcattagggtaacatgtttgcgcatgttgccctttt

SEQ ID NO: 4 - protein, 257 aa, Staphylococcus aureus
MKKTAFILLLFIALTWTTSPLVNGSEKSEEINEKDLRKKSELQGAALGNLKQIYYYNEKAKTENKESHDQFLQHTILFKGFFTNHSWYNDLLVDFDSKDIVDKYKGKKVDLYGAYYGYQCAGGTPNKTACMYGGVTLHDNNRLTEEKKVPINLWLDGKQNTVPLETVKTNKKNVTVQELDLQARRYLQEKYNLYNSDVFDGKVQRGLIVFHTSTEPSVNYDLFGAQGQNSNTLLRIYRDNKTINSENMHIDIYLYTS

SEQ ID NO: 5 - DNA, 1712 bp, Staphylococcus aureus
  CDS (244)..(1044)
gaactaggtagaaaaataattatgagaaaacactatgttgttaaagatgttttcgtatataagtttaggtgatgtatagttacttaattttaaaagcataacttaattaatataaataacatgagattattaaatataattaagtttcttttaatgtttttttaattgaatatttaagattataacatatatttaaagtgtatctagatactttttgggaatgttggataaaggagataaaaaatgtataagagattatttatttcacatgtaattttgatattcgcactgatattagttatttctacacccaacgttttagcagagagtcaaccagatcctaaaccagatgagttgcacaaatcgagtaaattcactggtttgatggaaaatatgaaagttttgtatgatgataatcatgtatcagcaataaacgttaaatctatagatcaatttctatactttgacttaatatattctattaaggacactaagttagggaattatgataatgttcgagtcgaatttaaaaacaaagatttagctgataaatacaaagataaatacgtagatgtgtttggagctaattattattatcaatgttatttttctaaaaaaacgaatgatattaattcgcatcaaactgacaaacgaaaaacttgtatgtatggtggtgtaactgagcataatggaaaccaattagataaatatagaagtattactgttcgggtatttgaagatggtaaaaatttattatcttttgacgtacaaactaataagaaaaaggtgactgctcaagaattagattacctaactcgtcactatttggtgaaaaataaaaaactctatgaatttaacaactcgccttatgaaacgggatatattaaatttatagaaaatgagaatagcttttggtatgacatgatgcctgcaccaggagataaatttgaccaatctaaatatttaatgatgtacaatgacaataaaatggttgattctaaagatgtgaagattgaagtttatcttacgacaaagaaaaagtgaaattatattttagaaaagtaaatatgaagagttagtaattaaggcaggcacttatagagtacctgccttttctaatattatttagttatagttatttttgttatatctctctgatttagcattaaccccttgttgccattatagttttcaccaactttagctgaaattgggggatcatttttatctttactatggatagttactgtgtcgccgtttttaacgatttgtttctcttttaatttgtcagttaattttttccatgcatcatttgcgtcaaacctatttccatttggatttattcttgacaaatcaattcttttaacactatcggtattaatcggcttgttattaaaattactaagttcatctaaatcagctgtacccgtaatactactttcgccaccattatttaaattgtacgtaacaccaactgtctcatttgctgttttatcgataatatttgcttctttcaaagcatctcttacatttttccataagtctctatctgttatttcagaagcctttgcaacgttattaataccattataatttgaagaagaatgaaaacctgaacctactgttgttaaaactaaagcacttgctatcaatgttcttgttaatagttttttattcattttattttctcctataacttatttgcaatcgat

SEQ ID NO: 6 - protein, 266 aa, Staphylococcus aureus
MYKRLFISHVILIFALILVISTPNVLAESQPDPKPDELHKSSKFTGLMENMKVLYDDNHVSAINVKSIDQFLYFDLIYSIKDTKLGNYDNVRVEFKNKDLADKYKDKYVDVFGANYYYQCYFSKKTNDINSHQTDKRKTCMYGGVTEHNGNQLDKYRSITVRVFEDGKNLLSFDVQTNKKKVTAQELDYLTRHYLVKNKKLYEFNNSPYETGYIKFIENENSFWYDMMPAPGDKFDQSKYLMMYNDNKMVDSKDVKIEVYLTTKKK

SEQ ID NO: 7 - DNA, 1095 bp, Staphylococcus aureus
  CDS (118)..(918)
atcattaaatataattaattttcttttaatatttttttaattgaatatttaagattataagatatatttaaagtgtatctagatactttttgggaatgttggatgaaggagataaaaatgaataagagtcgatttatttcatgcgtaattttgatattcgcacttatactagttctttttacacccaacgtattagcagagagccaaccagaccctacgccagatgagttgcacaaagcgagtaaattcactggtttgatggaaaatatgaaagttttatatgatgatcattatgtatcagcaactaaagttaagtctgtagataaatttttggcacatgatttaatttataacattagtgataaaaaactgaaaaattatgacaaagtgaaaacagagttattaaatgaaggtttagcaaagaagtacaaagatgaagtagttgatgtgtatggatcaaattactatgtaaactgctatttttcatccaaagataatgtaggtaaagttacaggtggcaaaacttgtatgtatggaggaataacaaaacatgaaggaaaccactttgataatgggaacttacaaaatgtacttataagagtttatgaaaataaaagaaacacaatttcttttgaagtgcaaactgataagaaaagtgtaacagctcaagaactagacataaaagctaggaattttttaattaataaaaaaaatttgtatgagtttaacagttcaccatatgaaacaggatatataaaatttattgaaaataacggcaatactttttggtatgatatgatgcctgcaccaggcgataagtttgaccaatctaaatatttaatgatgtacaacgacaataaaacggttgattctaaaagtgtgaagatagaagtccaccttacaacaaagaatggataatgttaatccgattttgatataaaaagtgaaagtattagatatatttgaaaggtaagtacttcggtgcttgcctttttaggatgcatatatatagattaaaccgcacttctatattaatagaaagtgcggttatttatacactcaatctaaactataataattggaatcatcttcaaa

SEQ ID NO: 8 - protein, 266 aa, Staphylococcus aureus
MNKSRFISCVILIFALILVLFTPNVLAESQPDPTPDELHKASKFTGLMENMKVLYDDHYVSATKVKSVDKFLAHDLIYNISDKKLKNYDKVKTELLNEGLAKKYKDEVVDVYGSNYYVNCYFSSKDNVGKVTGGKTCMYGGITKHEGNHFDNGNLQNVLIRVYENKRNTISFEVQTDKKSVTAQELDIKARNFLINKKNLYEFNSSPYETGYIKFIENNGNTFWYDMMPAPGDKFDQSKYLMMYNDNKTVDSKSVKIEVHLTTKNG

SEQ ID NO: 9 - DNA, 1136 bp, Staphylococcus aureus
  CDS (292)..(1068)
gatcaaatatattgatataatgaaagtgagcaagttggatagattgcggctagtctcttgaaaaaagggattcctatgtttatagttggtacttctaggaaggactagcatgtcttatttcgaaatgctgatggttgtattaacaattatgagtttagtcttaattagtaatcaaaactctgaatgtattgtctacataatcggtgtaacaataatatatatccgaaagattaaagtactctataaaagaatcatttaaaggtgctcaaatttattgaaaaaaggtggaatatgaaaaaatttaacattcttattgcattactcttttttactagtttggtaatatctcctttaaacgttaaagccaatgaaaacattgattcagtaaaagagaaagaattgcataaaaaatctgaattaagtagtaccgcgctaaataatatgaaacattcttatgcagataaaaatccaataataggagaaaataaaagtacaggagatcaatttttagaaaatactttgctttacaaaaaattttttactgaccttatcaattttgaagatttattaataaacttcaattcaaaagaaatggctcaacatttcaaatctaaaaatgtagatgtttaccctataagatatagcattaattgttatggtggtgaaatagataggactgcttgtacatatggaggtgtcactccacacgaaggtaataaattaaaagaacgaaaaaaaataccaatcaatttgtggataaatggtgtacaaaaagaagtttctttagataaagttcaaacagataaaaaaaatgttaccgtacaagaattagatgcacaagcaaggcgctatttgcaaaaggatttaaaattgtataataatgatactctcggaggaaaaatacagcgcggaaaaatagagtttgattcttctgatgggtctaaagtctcttatgatttatttgatgttaagggtgattttcccgaaaaacaattacgaatatacagtgataataaaacattatccacagagcaccttcatattgacatctatttatatgaaaagtagtcaattcaaatactttaacatcagacactaaagccatttcaaagaatgctaaagatttattaatcggt

SEQ ID NO: 10 - protein, 258 aa, Staphylococcus aureus
MKKFNILIALLFFTSLVISPLNVKANENIDSVKEKELHKKSELSSTALNNMKHSYADKNPIIGENKSTGDQFLENTLLYKKFFTDLINFEDLLINFNSKEMAQHFKSKNVDVYPIRYSINCYGGEIDRTACTYGGVTPHEGNKLKERKKIPINLWINGVQKEVSLDKVQTDKKNVTVQELDAQARRYLQKDLKLYNNDTLGGKIQRGKIEFDSSDGSKVSYDLFDVKGDFPEKQLRIYSDNKTLSTEHLHIDIYLYEK

SEQ ID NO: 11 - DNA, 774 bp, Staphylococcus aureus
  CDS (1)..(744)
atgaaaaaaacagcatttatactacttttattcattgccctaacgttgacaacaagtccacttgtaaatggtagcgagaaaagcgaagaaataaatgaaaaagatttgcgaaaaaagtctgaattacaaagaaatgctttaagcaatcttaggcaaatttattattataatgaaaaagctataactgaaaacaaagagagtgatgatcagtttttagagaatactttgttatttaaaggttttttcacaggtcatccatggtataacgatttattagtagatcttggttcaaaagatgctactaataaatataaagggaaaaaagtagacttatatggtgcttattatggatatcaatgtgctggaggcacaccaaataaaacagcatgtatgtacgggggtgtaacattacatgataataaccgattgaccgaagaaaaaaaagtaccaattaacttgtggatagacggaaaacaaactacagtacctatagataaagttaaaacaagcaaaaaagaagtaactgttcaagagctagatcttcaggcaaggcattatttacacggaaaatttggtttatataactcagacagctttggcggtaaggtgcaaagaggcttgattgtgtttcattcttctgaagggtccacggtaagttatgatttgtttgatgctcaagggcaatatccagatacattattaagaatttacagagataataaaactattaattcagagaacctccatattgatttgtatttatacacaacttga

SEQ ID NO: 12 - protein, 248 aa, Staphylococcus aureus
MKKTAFILLLFIALTLTTSPLVNGSEKSEEINEKDLRKKSELQRNALSNLRQIYYYNEKAITENKESDDQFLENTLLFKGFFTGHPWYNDLLVDLGSKDATNKYKGKKVDLYGAYYGYQCAGGTPNKTACMYGGVTLHDNNRLTEEKKVPINLWIDGKQTTVPIDKVKTSKKEVTVQELDLQARHYLHGKFGLYNSDSFGGKVQRGLIVFHSSEGSTVSYDLFDAQGQYPDTLLRIYRDNKTINSENL

SEQ ID NO: 13 - DNA, 731 bp, Staphylococcus aureus
  CDS (16)..(720)
taaggagaattaaaaatgaataaaaaattactaatgaatttttttatcgtaagccctttgttgcttgcgacaactgctacagattttacccctgttcccttatcatctaatcaaataatcaaaactgcaaaagcatctacaaacgataatataaaggatttgctagactggtatagtagtgggtctgacacttttacaaatagtgaagttttagataattccttaggatctatgcgtataaaaaacacagatggcagcatcagcttgataatttttccgagtccttattatagccctgcttttacaaaaggggaaaaagttgacttaaacacaaaaagaactaaaaaaagccaacatactagcgaaggaacttatatccatttccaaataagtggcgttacaaatactgaaaaattacctactccaatagaactacctttaaaagttaaggttcatggtaaagatagccccttaaagtatgggccaaagttcgataaaaaacaattagctatatcaactttagactttgaaattcgtcatcagctaactcaaatacatggattatatcgttcaagcgataaaacgggtggttattggaaaataacaatgaatgacggatccacatatcaaagtgatttatctaaaaagtttgaatacaatactgaaaaaccacctataaatattgatgaaataaaaactatagaagcagaaattaattaatttaccacttt

SEQ ID NO: 14 - protein, 234 aa, Staphylococcus aureus
MNKKLLMNFFIVSPLLLATTATDFTPVPLSSNQIIKTAKASTNDNIKDLLDWYSSGSDTFTNSEVLDNSLGSMRIKNTDGSISLIIFPSPYYSPAFTKGEKVDLNTKRTKKSQHTSEGTYIHFQISGVTNTEKLPTPIELPLKVKVHGKDSPLKYGPKFDKKQLAISTLDFEIRHQLTQIHGLYRSSDKTGGYWKITMNDGSTYQSDLSKKFEYNTEKPPINIDEIKTIEAEIN

SEQ ID NO: 15 - DNA, 1031 bp, Streptococcus pyogenes
  CDS (79)..(831)
attgttaataataatggttaattgtaataacctttttaaatctaaaggagaacccagatataaaatggaggaatattaatggaaaacaataaagaagtattgaagaaaatggtattttttgttttaatgaaatttcttggactaacaatcttgccaaaaggtatttgttcaacaagacccaagcccagccaattacaaagatctaatttagttaaaaccttcaaaatatatattttctttatgagggtgaccctggttactcacgagaatgtgaaatctgttgatcaacttttatcacacgatttaatatataatgtttcagggccaaattatgataaattaaaaactgaacttaagaaccaagagatggcaactttatttaaggataaaaacgttgatatttatggtgtagaatattaccatctctgttatttatgtgaaaatgcagaaaggagtgcatgtctctacggaggggtaacaaatcatgaagggaatcatttagaaattcctaaaaagatagtcgttaaagtatcaatcgatggtatccaaagcctatcatttgatattgaacaaataaaaaatggtaactgctcaagaattagctatacagttagaaaatatcttacagataataagcaactatatactaatggaccttctaaatatgaaactggatatataaagttcatacctaagaataaagaaagtttttggtttgattttttccctgaaccagaatttactcaatctaaatatcttatgatatataaagataatgaaacgcttgactcaaacacaagccaaattgaagtctacctaacaaccaagtaacttttgcttttggcaaccttacctactgctggatttagaaattttattgcaattcttttattaatgtaaaaacgctcatttgatgagcggttttgtcttatctaaaggagctttacctcctaatgctgcaaaattttaaatgttggatttttgtatttgtcattgtatttgatgggtaatcccatttttcgacagacatc

SEQ ID NO: 16 - protein, 250 aa, Streptococcus pyogenes
MENNKEVLKKMVFFVLMKFLGLTILPKGICSTRPKPSQLQRSNLVKTFKIYIFFMRVTLVTHENVKSVDQLLSHDLIYNVSGPNYDKLKTELKNQEMATLFKDKNVDIYGVEYYHLCYLCENAERSACLYGGVTNHEGNHLEIPKKIVVKVSIDGIQSLSFDIEQIKNGNCSRISYTVRKYLTDNKQLYTNGPSKYETGYIKFIPKNKESFWFDFFPEPEFTQSKYLMIYKDNETLDSNTSQIEVYLTTK

SEQ ID NO: 17 - DNA, 25 bp, Unknown
  Primer
gggaattccatggagagtcaaccag

SEQ ID NO: 18 - DNA, 21 bp, Unknown
  Primer
gcaagcttaacttgttaatag

SEQ ID NO: 19 - DNA, 22 bp, Unknown
  Primer
gggaattccatggagaaaagcg

SEQ ID NO: 20 - DNA, 22 bp, Unknown
  Primer
gcggatcctcactttttctttg

SEQ ID NO: 21 - DNA, 50 bp, Unknown
  Primer
ggggtaccccgaaggaggaaaaaaaaatgtctacaaacgataatataaag

SEQ ID NO: 22 - DNA, 42 bp, Unknown
  Primer
tgctctagagcattaattaatttctgcttctatagtttttat

SEQ ID NO: 23 - DNA, 1612 bp, Escherichia coli
  CDS (200)..(1159)
agtcctcgatggcggtccattatctgcattatgcgttgttagctcagccggacagagcaattgccttctgagcaatcggtcactggttcgaatccagtacaacgcgccatatttatttaccaggctcgcttttgcgggccttttttatatctgcgccgggtctggtgctgattacttcagccaaaaggaacacctgtatatgaagtgtatattatttaaatgggtactgtgcctgttactgggtttttcttcggtatcctattcccgggagtttacgatagacttttcgacccaacaaagttatgtctcttcgttaaatagtatacggacagagatatcgacccctcttgaacatatatctcaggggaccacatcggtgtctgttattaaccacaccccaccgggcagttattttgctgtggatatacgagggcttgatgtctatcaggcgcgttttgaccatcttcgtctgattattgagcaaaataatttatatgtggccgggttcgttaatacggcaacaaatactttctaccgtttttcagattttacacatatatcagtgcccggtgtgacaacggtttccatgacaacggacagcagttataccactctgcaacgtgtcgcagcgctggaacgttccggaatgcaaatcagtcgtcactcactggtttcatcatatctggcgttaatggagttcagtggtaatacaatgaccagagatgcatccagagcagttctgcgttttgtcactgtcacagcagaagccttacgcttcaggcagatacagagagaatttcgtcaggcactgtctgaaactgctcctgtgtatacgatgacgccgggagacgtggacctcactctgaactgggggcgaatcagcaatgtgcttccggagtatcggggagaggatggtgtcagagtggggagaatatcctttaataatatatcagcgatactggggactgtggccgttatactgaattgccatcatcagggggcgcgttctgttcgcgccgtgaatgaagagagtcaaccagaatgtcagataactggcgacaggcctgttataaaaataaacaatacattatgggaaagtaatacagctgcagcgtttctgaacagaaagtcacagtttttatatacaacgggtaaataaaggagttaagcatgaagaagatgtttatggcggttttatttgcattagcttctgttaatgcaatggcggcggattgtgctaaaggtaaaattgagttttccaagtataatgaggatgacacatttacagtgaaggttgacgggaaagaatactggaccagtcgctggaatctgcaaccgttactgcaaagtgctcagttgacaggaatgactgtcacaatcaaatccagtacctgtgaatcaggctccggatttgctgaagtgcagtttaataatgactgaggcataacctgattcgtggtatgtgggtaacaagtgtaatctgtgtcacaattcagtcagttgacagttgcctgtcagactgagcatttgttaaaaaaatttcgcatggtgaatccccctgtgtggaggggcgactggtgaaaaatccttgcttgtgattcattatcgacac

SEQ ID NO: 24 - protein, 319 aa, Escherichia coli
MKCILFKWVLCLLLGFSSVSYSREFTIDFSTQQSYVSSLNSIRTEISTPLEHISQGTTSVSVINHTPPGSYFAVDIRGLDVYQARFDHLRLIIEQNNLYVAGFVNTATNTFYRFSDFTHISVPGVTTVSMTTDSSYTTLQRVAALERSGMQISRHSLVSSYLALMEFSGNTMTRDASRAVLRFVTVTAEALRFRQIQREFRQALSETAPVYTMTPGDVDLTLNWGRISNVLPEYRGEDGVRVGRISFNNISAILGTVAVILNCHHQGARSVRAVNEESQPECQITGDRPVIKINNTLWESNTAAAFLNRKSQFLYTTGK

SEQ ID NO: 25 - protein, 4 aa, Mus musculus
YQTI

SEQ ID NO: 26 - DNA, 31 bp, Unknown
  Primer
gaattcaagcttatgatcactatgcttcaag

SEQ ID NO: 27 - DNA, 29 bp, Unknown
  Primer
gaattcctgcagtcagacattattctaac

SEQ ID NO: 28 - DNA, 3938 bp, Yersinia pseudotuberculosis
  CDS (474)..(3434)
tcatcaaggcaaccatcaggattaatgcggatattgcggagtaacacttcagactgaaagtagaaataaaaaccgcagcagacaactgacaacatcaaatgaagggggcttattctaattgatattatttatatgataatagttcattttgtatttttgttttttttgatattctcacctgcttagttacaataaatcaattctatcgctgtatggtatagactgttttattatatattttgaatatttttaatctgcccagtctggttttttaaaaaagtgctatcctcttaatgtctttactaaattagaaaacaagtttcactttcaactattgcatctttaattaatggtcaaggtgatttcaaatgctcgtttgtggccagttatacctcaaataactcaagttgttgagcacagccaacgcacatgcagtttgacgtatgacaggtatgctttatttcatttaaattatgatggttttccagccaatcagtgagtttctcttgataaggaatgcgggaatgtctatgtattttaataaaataatttcatttaatattatttcacgaatagttatttgtatctttttgatatgtggaatgttcatggctggggcttcagaaaaatatgatgctaacgcaccgcaacaggtccagccttattctgtctcttcatctgcatttgaaaatctccatcctaataatgaaatggagagttcaatcaatcccttttccgcatcggatacagaaagaaatgctgcaataatagatcgcgccaataaggagcaggagactgaagcggtgaataagatgataagcaccggggccaggttagctgcatcaggcagggcatctgatgttgctcactcaatggtgggcgatgcggttaatcaagaaatcaaacagtggttaaatcgattcggtacggctcaagttaatctgaattttgacaaaaatttttcgctaaaagaaagctctcttgattggctggctccttggtatgactctgcttcattcctcttttttagtcagttaggtattcgcaataaagacagccgcaacacacttaaccttggcgtcgggatacgtacattggagaacggttggctgtacggacttaatactttttatgataatgatttgaccggccacaaccaccgtatcggtcttggtgccgaggcctggaccgattatttacagttggctgccaatgggtattttcgcctcaatggatggcactcgtcgcgtgatttctccgactataaagagcgcccagccactgggggggatttgcgcgcgaatgcttatttacctgcactcccacaactgggggggaagttgatgtatgagcaatacaccggtgagcgtgttgctttatttggtaaagataatctgcaacgcaacccttatgccgtgactgccgggatcaattacacccccgtgcctctactcactgtcggggtagatcagcgtatggggaaaagcagtaagcatgaaacacagtggaacctccaaatgaactatcgcctgggcgagagttttcagtcgcaacttagcccttcagcggtggcaggaacacgtctactggcggagagccgctataaccttgtcgatcgtaacaataatatcgtgttggagtatcagaaacagcaggtggttaaactgacattatcgccagcaactatctccggcctgccgggtcaggtttatcaggtgaacgcacaagtacaaggggcatctgctgtaagggaaattgtctggagtgatgccgaactgattgccgctggcggcacattaacaccactgagtaccacacaattcaacttggttttaccgccttataaacgcacagcacaagtgagtcgggtaacggacgacctgacagccaacttttattcgcttagtgcgctcgcggttgatcaccaaggaaaccgatctaactcattcacattgagcgtcaccgttcagcagcctcagttgacattaacggcggccgtcattggtgatggcgcaccggctaatgggaaaactgcaatcaccgttgagttcaccgttgctgattttgaggggaaacccttagccgggcaggaggtggtgataaccaccaataatggtgcgctaccgaataaaatcacggaaaagacagatgcaaatggcgtcgcgcgcattgcattaaccaatacgacagatggcgtgacggtagtcacagcagaagtggaggggcaacggcaaagtgttgatacccactttgttaagggtactatcgcggcggataaatccactctggctgcggtaccgacatctatcatcgctgatggtctaatggcttcaaccatcacgttggagttgaaggatacctatggggacccgcaggctggcgcgaatgtggcttttgacacaaccttaggcaatatgggcgttatcacggatcacaatgacggcacttatagcgcaccattgaccagtaccacgttgggggtagcaacagtaacggtgaaagtggatggggctgcgttcagtgtgccgagtgtgacggttaatttcacggcagatcctattccagatgctggccgctccagtttcaccgtctccacaccggatatcttggctgatggcacgatgagttccacattatcctttgtccctgtcgataagaatggccattttatcagtgggatgcagggcttgagttttactcaaaacggtgtgccggtgagtattagccccattaccgagcagccagatagctataccgcgacggtggttgggaatagtgtcggtgatgtcacaatcacgccgcaggttgataccctgatactgagtacattgcagaaaaaaatatccctattcccggtacctacgctgaccggtattctggttaacgggcaaaatttcgctacggataaagggttcccgaaaacgatctttaaaaacgccacattccagttacagatggataacgatgttgctaataatactcagtatgagtggtcgtcgtcattcacacccaatgtatcggttaacgatcagggtcaggtgacgattacctaccaaacctatagcgaagtggctgtgacggcgaaaagtaaaaaattcccaagttattcggtgagttatcggttctacccaaatcggtggatatacgatggcggcagatcgctggtatccagtctcgaggccagcagacaatgccaaggttcagatatgtctgcggttcttgaatcctcacgtgcaaccaacggaacgcgtgcgcctgacgggacattgtggggcgagtgggggagcttgaccgcgtatagttctgattggcaatctggtgaatattgggtcaaaaagaccagcacggattttgaaaccatgaatatggacacaggcgcactgcaaccagggcctgcatacttggcgttcccgctctgtgcgctgtcaatataaccagataacagatagcaataagaacagtttaatgagctgattatttggggcgcgaatgggagtccggcaatcctagactcgccccataagtagcaaacgtccagaagaacaacgccgctcaggttaattgagcggcgctgtttttttaaaaggattgtcgcgattaaatgccgatcttacggcccaggatattggcacctttagcctgaccatcagggccatagagcgattggccgtggcgggtattcaggactgccaatgcttgattattatgttcaatatgttgttgtaacagtaacccattgtgcaggttgctgtaacgcaggcgctcagtgagttgcaaaagacgctgccaacgttcagctaaagcctgcatgtggggataaggcgcttgaatattcgcggtggtctcggtggttatccgggtctgatccaaataggccaaggttgccaatattgaacttttttgttccgttaccccttgcaatacccagccttggatcc

SEQ ID NO: 29 - protein, 986 aa, Yersinia pseudotuberculosis
MMVFQPISEFLLIRNAGMSMYFNKIISFNIISRIVICIFLICGMFMAGASEKYDANAPQQVQPYSVSSSAFENLHPNNEMESSINPFSASDTERNAAIIDRANKEQETEAVNKMISTGARLAASGRASDVAHSMVGDAVNQEIKQWLNRFGTAQVNLNFDKNFSLKESSLDWLAPWYDSASFLFFSQLGIRNKDSRNTLNLGVGIRTLENGWLYGLNTFYDNDLTGHNHRIGLGAEAWTDYLQLAANGYFRLNGWHSSRDFSDYKERPATGGDLRANAYLPALPQLGGKLMYEQYTGERVALFGKDNLQRNPYAVTAGINYTPVPLLTVGVDQRMGKSSKHETQWNLQMNYRLGESFQSQLSPSAVAGTRLLAESRYNLVDRNNNIVLEYQKQQVVKLTLSPATISGLPGQVYQVNAQVQGASAVREIVWSDAELIAAGGTLTPLSTTQFNLVLPPYKRTAQVSRVTDDLTANFYSLSALAVDHQGNRSNSFTLSVTVQQPQLTLTAAVIGDGAPANGKTAITVEFTVADFEGKPLAGQEVVITTNNGALPNKITEKTDANGVARIALTNTTDGVTVVTAEVEGQRQSVDTHFVKGTIAADKSTLAAVPTSIIADGLMASTITLELKDTYGDPQAGANVAFDTTLGNMGVITDHNDGTYSAPLTSTTLGVATVTVKVDGAAFSVPSVTVNFTADPIPDAGRSSFTVSTPDILADGTMSSTLSFVPVDKNGHFISGMQGLSFTQNGVPVSISPITEQPDSYTATVVGNSVGDVTITPQVDTLILSTLQKKISLFPVPTLTGILVNGQNFATDKGFPKTIFKNATFQLQMDNDVANNTQYEWSSSFTPNVSVNDQGQVTITYQTYSEVAVTAKSKKFPSYSVSYRFYPNRWIYDGGRSLVSSLEASRQCQGSDMSAVLESSRATNGTRAPDGTLWGEWGSLTAYSSDWQSGEYWVKKTSTDFETMNMDTGALQPGPAYLAFPLCALSI

SEQ ID NO: 30 - protein, 9 aa, Artificial Sequence
  Synthetic Sequence
  MISC_FEATURE (2)..(2): Xaa is any amino acid
  MISC_FEATURE (5)..(5): Xaa is any amino acid
  MISC_FEATURE (9)..(9): Xaa is any amino acid
LXGGXGNDX

SEQ ID NO: 31 - DNA, 830 bp, Neisseria meningitidis
  CDS (143)..(667)
tcggcaaagcagccggataccgctacgtatcttgaagtattgaaaatattacgatgcaaaaaagaaaatttaagtataatacagcaggattctttaacggattcttaacaatttttctaactgaccataaaggaaccaaaatatgaaaaaagcacttgccacactgattgccctcgctctcccggccgccgcactggcggaaggcgcatccggcttttacgtccaagccgatgccgcacacgcaaaagcctcaagctctttaggttctgccaaaggcttcagcccgcgcatctccgcaggctaccgcatcaacgacctccgcttcgccgtcgattacacgcgctacaaaaactataaagccccatccaccgatttcaaactttacagcatcggcgcgtccgccatttacgacttcgacacccaatcgcccgtcaaaccgtatctcggcgcgcgcttgagcctcaaccgcgcctccgtcgacttgggcggcagcgacagcttcagccaaacctccatcggcctcggcgtattgacgggcgtaagctatgccgttaccccgaatgtcgatttggatgccggctaccgctacaactacatcggcaaagtcaacactgtcaaaaacgtccgttccggcgaactgtccgtcggcgtgcgcgtcaaattctgatatgcgccttattctgcaaaccgccgagccttcggcggttttgttttctgccaccgcaactacacaagccggcggttttgtacgataatcccgaatgctgcggcttctgccgccctattttttgaggaatccgaaatgtccaaaaccatcatccacaccgaca

SEQ ID NO: 32 - protein, 174 aa, Neisseria meningitidis
MKKALATLIALALPAAALAEGASGFYVQADAAHAKASSSLGSAKGFSPRISAGYRINDLRFAVDYTRYKNYKAPSTDFKLYSIGASAIYDFDTQSPVKPYLGARLSLNRASVDLGGSDSFSQTSIGLGVLTGVSYAVTPNVDLDAGYRYNYIGKVNTVKNVRSGELSVGVRVKF

SEQ ID NO: 33 - protein, 352 aa, Homo sapiens [sequence omitted]

SEQ ID NO: 34 - DNA, 645 bp, Homo sapiens
  CDS (10)..(639)
cttgcagggatgctgcgcgcgggagaagtccacaccgggaccaccatcatggcagtggagtttgacgggggcgttgtgatgggttctgattcccgagtgtctgcaggcgaggcggtggtgaaccgagtgtttgacaagctgtccccgctgcacgagcgcatctactgtgcactctctggttcagctgctgatgcccaagccgtggccgacatggccgcctaccagctggagctccatgggatagaactggaggaacctccacttgttttggctgctgcaaatgtggtgagaaatatcagctataaatatcgagaggacttgtctgcacatctcatggtagctggctgggaccaacgtgaaggaggtcaggtatatggaaccctgggaggaatgctgactcgacagccttttgccattggtggctccggcagcacctttatctatggttatgtggatgcagcatataagccaggcatgtctcccgaggagtgcaggcgcttcaccacagacgctattgctctggccatgagccgggatggctcaagcgggggtgtcatctacctggtcactattacagctgccggtgtggaccatcgagtcatcttgggcaatgaactgccaaaattctatgatgagtgaaccttc

SEQ ID NO: 35 - protein, 209 aa, Homo sapiens
MLRAGEVHTGTTIMAVEFDGGVVMGSDSRVSAGEAVVNRVFDKLSPLHERIYCALSGSAADAQAVADMAAYQLELHGIELEEPPLVLAAANVVRNISYKYREDLSAHLMVAGWDQREGGQVYGTLGGMLTRQPFAIGGSGSTFIYGYVDAAYKPGMSPEECRRFTTDAIALAMSRDGSSGGVIYLVTITAAGVDHRVILGNELPKFYDE

SEQ ID NO: 36 - DNA, 2247 bp, Homo sapiens
  CDS (1)..(2247)
atggctagctctaggtgtcccgctccccgcgggtgccgctgcctccccggagcttctctcgcatggctggggacagtactgctacttctcgccgactgggtgctgctccggaccgcgctgccccgcatattctccctgctggtgcccaccgcgctgccactgctccgggtctgggcggtgggcctgagccgctgggccgtgctctggctgggggcctgcggggtcctcagggcaacggttggctccaagagcgaaaacgcaggtgcccagggctggctggctgctttgaagccattagctgcggcactgggcttggccctgccgggacttgccttgttccgagagctgatctcatggggagcccccgggtccgcggatagcaccaggctactgcactggggaagtcaccctaccgccttcgttgtcagttatgcagcggcactgcccgcagcagccctgtggcacaaactcgggagcctctgggtgcccggcggtcagggcggctctggaaaccctgtgcgtcggcttctaggctgcctgggctcggagacgcgccgcctctcgctgttcctggtcctggtggtcctctcctctcttggggagatggccattccattctttacgggccgcctcactgactggattctacaagatggctcagccgataccttcactcgaaacttaactctcatgtccattctcaccatagccagtgcagtgctggagttcgtgggtgacgggatctataacaacaccatgggccacgtgcacagccacttgcagggagaggtgtttggggctgtcctgcgccaggagacggagtttttccaacagaaccagacaggtaacatcatgtctcgggtaacagaggacacgtccaccctgagtgattctctgagtgagaatctgagcttatttctgtggtacctggtgcgaggcctatgtctcttggggatcatgctctggggatcagtgtccctcaccatggtcaccctggtcaccctgcctctgcttttccttctgcccaagaaggtgggaaaatggtaccagttgctggaagtgcaggtgcgggaatctctggcaaagtccagccaggtggccattgaggctctgtcggccatgcctacagttcgaagctttgccaacgaggagggcgaagcccagaagtttagggaaaagctgcaagaaataaagacactcaaccagaaggaggctgtggcctatgcagtcaactcctggaccactagtatttcaggtatgctgctgaaagtgggaatcctctacattggtgggcagctggtgaccagtggggctgtaagcagtgggaaccttgtcacatttgttctctaccagatgcagttcacccaggctttggaggtactgctctccatctaccccagagtacagaaggctgtgggctcctcagagaaaatatttgagtacctggaccgcacccctcgctgcccacccagtggtctgttgactcccttacacttggagggccttgtccagttccaagatgtctcctttgcctacccaaaccgcccagatgtcttagtgctacaggggctgacattcaccctacgccctggcgaggtgacggcgctggtgggacccaatgggtctgggaagagcacagtggctgccctgctgcagaatctgtaccagcccaccgggggacagctgctgttggatgggaagccccttccccaatatgagcaccgctacctgcacaggcaggtggctgcagtgggacaagagccacaggtatttggaagaagtcttcaagaaaatattgcctatggcctgacccagaagccaactatggaggaaatcacagctgctgcagtaaagtctggggcccatagtttcatctctggactccctcagggctatgacacagaggtaggcgaggctgggagccagctgtcagggggtcagcaacaggcagtggcgttggcccgagcattgatccggaaaccgtgtgtacttatcctggatgatgccaccagtgccctggatgcaaacagccagttacaggtggagcagctcctgtacgaaagccctgagcggtactcccgctcagtgcttctcatcacccagcacctcagcctggtggagcaggctgaccacatcctctttctggaaggaggcgctatccgggaggggggaacccaccagcagctcatggagaaaaaggggtgctactgggccatggtgcaggctcctgcagatgctccagaatga

SEQ ID NO: 37 - protein, 748 aa, Homo sapiens
MASSRCPAPRGCRCLPGASLAWLGTVLLLLADWVLLRTALPRIFSLLVPTALPLLRVWAVGLSRWAVLWLGACGVLRATVGSKSENAGAQGWLAALKPLAAALGLALPGLALFRELISWGAPGSADSTRLLHWGSHPTAFVVSYAAALPAAALWHKLGSLWVPGGQGGSGNPVRRLLGCLGSETRRLSLFLVLVVLSSLGEMAIPFFTGRLTDWILQDGSADTFTRNLTLMSILTIASAVLEFVGDGIYNNTMGHVHSHLQGEVFGAVLRQETEFFQQNQTGNIMSRVTEDTSTLSDSLSENLSLFLWYLVRGLCLLGIMLWGSVSLTMVTLVTLPLLFLLPKKVGKWYQLLEVQVRESLAKSSQVAIEALSAMPTVRSFANEEGEAQKFREKLQEIKTLNQKEAVAYAVNSWTTSISGMLLKVGILYIGGQLVTSGAVSSGNLVTFVLYQMQFTQALEVLLSIYPRVQKAVGSSEKIFEYLDRTPRCPPSGLLTPLHLEGLVQFQDVSFAYPNRPDVLVLQGLTFTLRPGEVTALVGPNGSGKSTVAALLQNLYQPTGGQLLLDGKPLPQYEHRYLHRQVAAVGQEPQVFGRSLQENIAYGLTQKPTMEEITAAAVKSGAHSFISGLPQGYDTEVGEAGSQLSGGQQQAVALARALIRKPCVLILDDATSALDANSQLQVEQLLYESPERYSRSVLLITQHLSLVEQADHILFLEGGAIREGGTHQQLMEKKGCYWAMVQAPADAPE

SEQ ID NO: 38 - DNA, 2085 bp, Homo sapiens
  CDS (65)..(2005)
gtgcagctcttgggttttttgtggcttccttcgttattggagccaggcctacaccccagcaaccatgtccaagggacctgcagttggtattgatcttggcaccacctactcttgtgtgggtgttttccagcacggaaaagtcgagataattgccaatgatcagggaaaccgaaccactccaagctatgtcgcctttacggacactgaacggttgatcggtgatgccgcaaagaatcaagttgcaatgaaccccaccaacacagtttttgatgccaaacgtctgattggacgcagatttgatgatgctgttgtccagtctgatatgaaacattggccctttatggtggtgaatgatgctggcaggcccaaggtccaagtagaatacaagggagagaccaaaagcttctatccagaggaggtgtcttctatggttctgacaaagatgaaggaaattgcagaagcctaccttgggaagactgttaccaatgctgtggtcacagtgccagcttactttaatgactctcagcgtcaggctaccaaagatgctggaactattgctggtctcaatgtacttagaattattaatgagccaactgctgctgctattgcttacggcttagacaaaaaggttggagcagaaagaaacgtgctcatctttgacctgggaggtggcacttttgatgtgtcaatcctcactattgaggatggaatctttgaggtcaagtctacagctggagacacccacttgggtggagaagattttgacaaccgaatggtcaaccattttattgctgagtttaagcgcaagcataagaaggacatcagtgagaacaagagagctgtaagacgcctccgtactgcttgtgaacgtgctaagcgtaccctctcttccagcacccaggccagtattgagatcgattctctctatgaaggaatcgacttctatacctccattacccgtgcccgatttgaagaactgaatgctgacctgttccgtggcaccctggacccagtagagaaagcccttcgagatgccaaactagacaagtcacagattcatgatattgtcctggttggtggttctactcgtatccccaagattcagaagcttctccaagacttcttcaatggaaaagaactgaataagagcatcaaccctgatgaagctgttgcttatggtgcagctgtccaggcagccatcttgtctggagacaagtctgagaatgttcaagatttgctgctcttggatgtcactcctctttcccttggtattgaaactgctggtggagtcatgactgtcctcatcaagcgtaataccaccattcctaccaagcagacacagaccttcactacctattctgacaaccagcctggtgtgcttattcaggtttatgaaggcgagcgtgccatgacaaaggataacaacctgcttggcaagtttgaactcacaggcatacctcctgcaccccgaggtgttcctcagattgaagtcacttttgacattgatgccaatggtatactcaatgtctctgctgtggacaagagtacgggaaaagagaacaagattactatcactaatgacaagggccgtttgagcaaggaagacattgaacgtatggtccaggaagctgagaagtacaaagctgaagatgagaagcagagggacaaggtgtcatccaagaattcacttgagtcctatgccttcaacatgaaagcaactgttgaagatgagaaacttcaaggcaagattaacgatgaggacaaacagaagattctggacaagtgtaatgaaattatcaactggcttgataagaatcagactgctgagaaggaagaatttgaacatcaacagaaagagctggagaaagtttgcaaccccatcatcaccaagctgtaccagagtgcaggaggcatgccaggaggaatgcctgggggatttcctggtggtggagctcctccctctggtggtgcttcctcagggcccaccattgaagaggttgattaagccaaccaagtgtagatgtagcattgttccacacatttaaaacatttgaaggacctaaattcgtagcaaattctgtggca

SEQ ID NO: 39 - protein, 646 aa, Homo sapiens
MSKGPAVGIDLGTTYSCVGVFQHGKVEIIANDQGNRTTPSYVAFTDTERLIGDAAKNQVAMNPTNTVFDAKRLIGRRFDDAVVQSDMKHWPFMVVNDAGRPKVQVEYKGETKSFYPEEVSSMVLTKMKEIAEAYLGKTVTNAVVTVPAYFNDSQRQATKDAGTIAGLNVLRIINEPTAAAIAYGLDKKVGAERNVLIFDLGGGTFDVSILTIEDGIFEVKSTAGDTHLGGEDFDNRMVNHFIAEFKRKHKKDISENKRAVRRLRTACERAKRTLSSSTQASIEIDSLYEGIDFYTSITRARFEELNADLFRGTLDPVEKALRDAKLDKSQIHDIVLVGGSTRIPKIQKLLQDFFNGKELNKSINPDEAVAYGAAVQAAILSGDKSENVQDLLLLDVTPLSLGIETAGGVMTVLIKRNTTIPTKQTQTFTTYSDNQPGVLIQVYEGERAMTKDNNLLGKFELTGIPPAPRGVPQIEVTFDIDANGILNVSAVDKSTGKENKITITNDKGRLSKEDIERMVQEAEKYKAEDEKQRDKVSSKNSLESYAFNMKATVEDEKLQGKINDEDKQKILDKCNEIINWLDKNQTAEKEEFEHQQKELEKVCNPIITKLYQSAGGMPGGMPGGFPGGGAPPSGGASSGPTIEEVD

SEQ ID NO: 40 - DNA, 3827 bp, Staphylococcus aureus
  CDS (151)..(3702)
atgcacttgtattcgttatactgtatatattttgcataataaaataataatatgaatttttgataaatttcattgaataagaactaaattagtttataatttattattagtatcctgtggatatgacatagagtataaggaggggtttttatgaacaaaaatgtgttgaagtttatggtctttataatgttattaaatatcatcacacctttatttaataaaaatgaagcatttgcagcacgagatatttcatcaacgaatgttacagatttaactgtatcaccgtctaagatagaagatggtggtaaaacgacagtaaaaatgacgttcgacgataaaaatggaaaaatacaaaatggtgacatgattaaagtggcatggccgacaagcggtacagtaaagatagagggttatagtaaaacagtaccattaactgttaaaggtgaacaggtgggtcaagcagttattacaccagacggtgcaacaattacattcaatgataaagtagaaaaattaagtgatgtttcgggatttgcagaatttgaagtacaaggaagaaatttaacgcaaacaaatacttcagatgacaaagtagctacgataacatctgggaataaatcaacgaatgttacggttcataaaagtgaagcgggaacaagtagtgttttctattataaaacgggagatatgctaccagaagatacgacacatgtacgatggtttttaaatattaacaatgaaaaaagttatgtatcgaaagatattactataaaggatcagattcaaggtggacagcagttagatttaagcacattaaacattaatgtgacaggtacacatagcaattattatagtggacaaagtgcaattactgattttgaaaaagcctttccaggttctaaaataactgttgataatacgaagaacacaattgatgtaacaattccacaaggctatgggtcatataatagtttttcaattaactacaaaaccaaaattacgaatgaacagcaaaaagagtttgttaataattcacaagcttggtatcaagagcatggtaaggaagaagtgaacgggaaatcatttaatcatactgtgcacaatattaatgctaatgccggtattgaaggtactgtaaaaggtgaattaaaagttttaaaacaggataaagataccaaggctcctatagctaatgtaaaatttaaactttctaaaaaagatggatcagttgtaaaggacaatcaaaaagaaattgagattataacagatgcaaacggtattgctaatattaaagcgttgcctagtggagactatattttaaaagaaatagaggcgccacgaccgtatacatttgataaggataaagaatatccgtttactatgaaagatacagataatcagggatattttacgactattgaaaatgcaaaagcgatagaaaaaacaaaagatgtttctgctcaaaaggtttgggaaggcactcaaaaagtgaaaccaacgatttatttcaagttgtacaaacaagatgacaatcaaaatacaacaccagtagacaaagcagagattaaaaaattagaagatggaacgacaaaagtgacatggtctaatcttccggaaaatgacaaaaatggcaaggctattaaatatttagttaaagaagtaaatgctcaaggtgaagatacaacaccagaaggatatactaaaaaagaaaatggtttagtggttactaatactgaaaaaccaatcgaaacaacatcaattagtggtgaaaaagtatgggacgacaaagacaatcaagatggtaagagaccagaaaaagtcagtgtgaatttattggctaacggggagaaagtaaaaacgttagacgtgacatctgaaacaaactggaagtacgaatttaaagacttaccgaagtatgatgaaggaaagaaaatagaatatacagtgaccgaagatcacgtaaaagactacacaacagacatcaacggtacgacaataacgaacaagtatacaccaggagagacatcggcaacagtaacaaaaaattgggatgacaataataaccaagacggaaaacgaccaactgaaatcaaagttgagttatatcaagatggaaaagcaacaggaaaaacggcaatattaaatgaatctaataactggacacatacgtggacaggattagatgaaaaagcaaaaggacaacaagtaaaatacacagtcgaggaattaacaaaggtcaaaggttatacaacacatgtggataacaatgatatgggtaacttgattgtgacgaataaatatacgccagaaacaacatcaattagtggtgaaaaagtatgggacgacaaagacaatcaagatggtaagagaccagaaaaagtcagtgtgaatttattggctgatggagagaaagtaaaaacgttagacgtgacatctgaaacaaactggaagtacgaatttaaagacttaccgaagtatgatgaaggaaagaaaatagaatatacagtgaccgaagatcacgtaaaagactacacaacagacatcaacggtacgacaataacgaacaagtatacaccaggagagacatcggcaacagtaacaaaaaattgggatgacaataataaccaagacggaaaacgaccaactgaaatcaaagttgagttatatcaagatggaaaagcaacaggaaaaacggcaatattaaatgaatctaataactggacacatacgtggacaggattagatgaaaaagcaaaaggacaacaagtaaaatacacagtcgaggaattaacaaaggtcaaaggttatacaacacatgtggataacaatgatatgggcaacttgattgtgacgaataaatatacgccagaaacaacatcaattagtggtgaaaaagtatgggacgacaaagacaatcaagatggtaagagaccagaaaaagtcagtgtgaatttattggctaacggagagaaagtaaaaacgttagacgtgacatctgaaacaaactggaagtacgaatttaaagacttaccgaagtatgatgaaggaaagaaaatagaatatacagtgaccgaagatcacgtaaaagactacacaacagacatcaacggtacgacaataacgaacaagtatacaccaggagagacatcggcaacagtaacaaaaaattgggatgacaataataaccaagacggaaaacgaccaactgaaatcaaagttgagttatatcaagatggaaaagcaacaggaaaaacggcaatattaaatgaatctaataactggacacatacgtggacaggattagatgaaaaagcaaaaggacaacaagtaaaatacacagtcgatgaattaacaaaagttaatggctatacaacgcatgtggataacaatgatatgggtaacttgattgtgacaaataaatatacgccgaaaaaaccgaataaaccaatctatcctgaaaaaccaaaagacaaaacaccaccaactaaacctgatcattctaataaagttaaaccaactcccccagataagccatcaaaagtggataaggatgatcaacctaaagataataaaaccaaacctgaaaatcctctaaaagaattaccaaaaactggtatgaagattataacttcatggattacatgggtatttataggtatattgggactgtatttaattttaagaaaaagatttaactcataaaccattataattatttttatagataaggctattcttagttctatgtataatacatgtatattaataggtcacttttaatctgtatgtaagcagactaagagtggccttttaaacaaataaaaaaa

SEQ ID NO: 41 - protein, 1183 aa, Staphylococcus aureus
MNKNVLKFMVFIMLLNIITPLFNKNEAFAARDISSTNVTDLTVSPSKIEDGGKTTVKMTFDDKNGKIQNGDMIKVAWPTSGTVKIEGYSKTVPLTVKGEQVGQAVITPDGATITFNDKVEKLSDVSGFAEFEVQGRNLTQTNTSDDKVATITSGNKSTNVTVHKSEAGTSSVFYYKTGDMLPEDTTHVRWFLNINNEKSYVSKDITIKDQIQGGQQLDLSTLNINVTGTHSNYYSGQSAITDFEKAFPGSKITVDNTKNTIDVTIPQGYGSYNSFSINYKTKITNEQQKEFVNNSQAWYQEHGKEEVNGKSFNHTVHNINANAGIEGTVKGELKVLKQDKDTKAPIANVKFKLSKKDGSVVKDNQKEIEIITDANGIANIKALPSGDYILKEIEAPRPYTFDKDKEYPFTMKDTDNQGYFTTIENAKAIEKTKDVSAQKVWEGTQKVKPTIYFKLYKQDDNQNTTPVDKAEIKKLEDGTTKVTWSNLPENDKNGKAIKYLVKEVNAQGEDTTPEGYTKKENGLVVTNTEKPIETTSISGEKVWDDKDNQDGKRPEKVSVNLLANGEKVKTLDVTSETNWKYEFKDLPKYDEGKKIEYTVTEDHVKDYTTDINGTTITNKYTPGETSATVTKNWDDNNNQDGKRPTEIKVELYQDGKATGKTAILNESNNWTHTWTGLDEKAKGQQVKYTVEELTKVKGYTTHVDNNDMGNLIVTNKYTPETTSISGEKVWDDKDNQDGKRPEKVSVNLLADGEKVKTLDVTSETNWKYEFKDLPKYDEGKKIEYTVTEDHVKDYTTDINGTTITNKYTPGETSATVTKNWDDNNNQDGKRPTEIKVELYQDGKATGKTAILNESNNWTHTWTGLDEKAKGQQVKYTVEELTKVKGYTTHVDNNDMGNLIVTNKYTPETTSISGEKVWDDKDNQDGKRPEKVSVNLLANGEKVKTLDVTSETNWKYEFKDLPKYDEGKKIEYTVTEDHVKDYTTDINGTTITNKYTPGETSATVTKNWDDNNNQDGKRPTEIKVELYQDGKATGKTAILNESNNWTHTWTGLDEKAKGQQVKYTVDELTKVNGYTTHVDNNDMGNLIVTNKYTPKKPNKPIYPEKPKDKTPPTKPDHSNKVKPTPPDKPSKVDKDDQPKDNKTKPENPLKELPKTGMKIITSWITWVFIGILGLYLILRKRFNS

SEQ ID NO: 42 - protein, 6 aa, Homo sapiens
  MISC_FEATURE (1)..(): Xaa can be Ile, Leu or Val
  MISC_FEATURE (2)..(2): Xaa can be any amino acid
  MISC_FEATURE (4)..(5): Xaa can be any amino acid
  MISC_FEATURE (6)..(6): Xaa can be Leu or Val
XXYXXX

SEQ ID NO: 43 - protein, 209 aa, Homo sapiens
MSPHPTALLGLVLCLAQTIHTQEEDLPRPSISAEPGTVIPLGSHVTFVCRGPVGVQTFRLERESRSTYNDTEDVSQASPSESEARFRIDSVSEGNAGPYRCIYYKPPKWSEQSDYLELLVKETSGGPDSPDTEPGSSAGPTQRPSDNSHNEHAPASQGLKAEHLYILIGVSVVFLFCLLLLVLFCLHRQNQIKQGPPRSKDEEQKPQQR

SEQ ID NO: 44 - protein, 410 aa, Homo sapiens
MSLMVVSMACVGFFLLEGPWPHVGGQDKPFLSAWPGTVVSEGQHVTLQCRSHLGFNEFSLSKEDGMPVPELYNRIFRNSFLMGPVTPAHAGTYRCCSSHPHSPTGWSAPSNPVVIMVTGVHRKPSLLAHPGPLVKSGETVILQCWSDVRFERFLLHREGITEDPLRLVGQLHDAGSQVNYSMGPMTPALAGTYRCFGSVTHLPYELSAPSDPLDIVVVGLYGKPSLSAQPGPTVQAGENVTLSCSSRSLFDIYHLSREAEAGELRLTAVLRVNGTFQANFPLGPVTHGGNYRCFGSFRALPHAWSDPSDPLPVSVTGNSRYLHALIGTSVVIIPFAILLFFLLHRWCANKKNAVVMDQEPAGNRTVNREDSDEQDPQEVTYAQLNHCVFTQRKITRPSQRPKTPPTDTSV

SEQ ID NO: 45 - protein, 237 aa, Homo sapiens
MTSEITYAEVRFKNEFKSSGINTASSAASKERTAPHKSNTGFPKLLCASLLIFFLLLAISFFIAFVIFFQKYSQLLEKKTTKELVHTTLECVKKNMPVEETAWSCCPKNWKSFSSNCYFISTESASWQDSEKDCARMEAHLLVINTQEEQDFIFQNLQEESAYFVGLSDPEGQRHWQWVDQTPYNESSTFWHPREPSDPNERCVVLNFRKSPKRWGWNDVNCLGPQRSVCEMMKIHL

SEQ ID NO: 46 - protein, 447 aa, Homo sapiens [sequence omitted]

SEQ ID NO: 47 - protein, 1709 aa, Homo sapiens
MGFLPKLLLLASFFPAGQASWGVSSPQDVQGVKGSCLLIPCIFSFPADVEVPDGITAIWYYDYSGQRQVVSHSADPKLVEARFRGRTEFMGNPEHRVCNLLLKDLQPEDSGSYNFRFEISEVNRWSDVKGTLVTVTEEPRVPTIASPVELLEGTEVDFNCSTPYVCLQEQVRLQWQGQDPARSVTFNSQKFEPTGVGHLETLHMAMSWQDHGRILRCQLSVANHRAQSEIHLQVKYAPKGVKILLSPSGRNILPGELVTLTCQVNSSYPAVSSIKWLKDGVRLQTKTGVLHLPQAAWSDAGVYTCQAENGVGSLVSPPISLHIFMAEVQVSPAGPILENQTVTLVCNTPNEAPSDLRYSWYKNHVLLEDAHSHTLRLHLATRADTGFYFCEVQNVHGSERSGPVSVVVNHPPLTPVLTAFLETQAGLVGILHCSVVSEPLATLVLSHGGHILASTSGDSDHSPRFSGTSGPNSLRLEIRDLEETDSGEYKCSATNSLGNATSTLDFHANAARLLISPAAEVVEGQAVTLSCRSGLSPTPDARFSWYLNGALLHEGPGSSLLLPAASSTDAGSYHCRARDGHSASGPSSPAVLTVLYPPRQPTFTTRLDLDAAGAGAGRRGLLLCRVDSDPPARLQLLHKDRVVATSLPSGGGCSTCGGCSPRMKVTKAPNLLRVEIHNPLLEEEGLYLCEASNALGNASTSATFNGQATVLAIAPSHTLQEGTEANLTCNVSREAAGSPANFSWFRNGVLWAQGPLETVTLLPVARTDAALYACRILTEAGAQLSTPVLLSVLYPPDRPKLSALLDMGQGHMALFICTVDSRPLALLALFHGEHLLATSLGPQVPSHGRFQAKAEANSLKLEVRELGLGDSGSYRCEATNVLGSSNTSLFFQVRGAWVQVSPSPELQEGQAVVLSCQVHTGVPEGTSYRWYRDGQPLQESTSATLRFAAITLTQAGAYHCQAQAPGSATTSLAAPISLHVSYAPRHVTLTTLMDTGPGRLGLLLCRVDSDPPAQLRLLHGDRLVASTLQGVGGPEGSSPRLHVAVAPNTLRLEIHGAMLEDEGVYICEASNTLGQASASADFDAQAVNVQVWPGATVREGQLVNLTCLVWTTHPAQLTYTWYQDGQQRLDAHSIPLPNVTVRDATSYRCGVGPPGRAPRLSRPITLDVLYAPRNLRLTYLLESHGGQLALVLCTVDSRPPAQLALSHAGRLLASSTAASVPNTLRLELRGPQPRDEGFYSCSARSPLGQANTSLELRLEGVRVILAPEAAVPEGAPITVTCADPAAHAPTLYTWYHNGRWLQEGPAASLSFLVATRAHAGAYSCQAQDAQGTRSSRPAALQVLYAPQDAVLSSFRDSRARSMAVIQCTVDSEPPAELALSHDGKVLATSSGVHSLASGTGHVQVARNALRLQVQDVPAGDDTYVCTAQNLLGSISTIGRLQVEGARVVAEPGLDVPEGAALNLSCRLLGGPGPVGNSTFAWFWNDRRLHAEPVPTLAFTHVARAQAGMYHCLAELPTGAAASAPVMLRVLYPPKTPTMMVFVEPEGGLRGILDCRVDSEPLASLTLHLGSRLVASSQPQGAPAEPHIHVLASPNALRVDIEALRPSDQGEYICSASNVLGSASTSTYFGVRALHRLHQFQQLLWVLGLLVGLLLLLLGLGACYTWRRRRVCKQSMGENSVEMAFQKETTQLIDPDAATCETSTCAPPLG

SEQ ID NO: 48 - protein, 847 aa, Homo sapiens
MHLLGPWLLLLVLEYLAFSDSSKWVFEHPETLYAWEGACVWIPCTYRALDGDLESFILFHNPEYNKNTSKFDGTRLYESTKDGKVPSEQKRVQFLGDKNKNCTLSIHPVHLNDSGQLGLRMESKTEKWMERIHLNVSERPFPPHIQLPPEIQESQEVTLTCLLNFSCYGYPIQLQWLLEGVPMRQAAVTSTSLTIKSVFTRSELKFSPQWSHHGKIVTCQLQDADGKFLSNDTVQLNVKHTPKLEIKVTPSDAIVREGDSVTMTCEVSSSNPEYTTVSWLKDGTSLKKQNTFTLNLREVTKDQSGKYCCQVSNDVGPGRSEEVFLQVQYAPEPSTVQILHSPAVEGSQVEFLCMSLANPLPTNYTWYHNGKEMQGRTEEKVHIPKILPWHAGTYSCVAENILGTGQRGPGAELDVQYPPKKVTTVIQNPMPIREGDTVTLSCNYNSSNPSVTRYEWKPHGAWEEPSLGVLKIQNVGWDNTTIACARCNSWCSWASPVALNVQYAPRDVRVRKIKPLSEIHSGNSVSLQCDFSSSHPKEVQFFWEKNGRLLGKESQLNFDSISPEDAGSYSCWVNNSIGQTASKAWTLEVLYAPRRLRVSMSPGDQVMEGKSATLTCESDANPPVSHYTWFDWNNQSLPHHSQKLRLEPVKVQHSGAYWCQGTNSVGKGRSPLSTLTVYYSPETIGRRVAVGLGSCLAILILAICGLKLQRRWKRTQSQQGLQENSSGQSFFVRNKKVRRAPLSEGPHSLGCYNPMMEDGISYTTLRFPEMNIPRTGDAESSEMQRPPRTCDDTVTYSALHKRQVGDYENVIPDFPEDEGIHYSELIQFGVGERPQAQENVDYVILKH

SEQ ID NO: 49 - protein, 32 aa, Homo sapiens
  MISC_FEATURE (2)..(2): Xaa is Ile or Leu
  MISC_FEATURE (3)..(3): Xaa can be any amino acid
  MISC_FEATURE (6)..(6): Xaa can be any amino acid
  MISC_FEATURE (8)..(25): Xaa can be any amino acid
  MISC_FEATURE (26)..(26): Xaa is Thr or Asn
  MISC_FEATURE (31)..(31): Xaa is Ile or Val
  MISC_FEATURE (32)..(32): Xaa is Lys or Arg
EXXYAXLXXXXXXXXXXXXXXXXXXXEYSEXX

SEQ ID NO: 50 - protein, 6 aa, Homo sapiens
  MISC_FEATURE (1)..(1): Xaa is Thr or Asn
  MISC_FEATURE (6)..(6): Xaa is Ile or Val
XEYSEX

SEQ ID NO: 51 - protein, 442 aa, Homo sapiens
MLPLLLPLLWAGALAQERRFQLEGPESLTVQEGLCVLVPCRLPTTLPASYYGYGYWFLEGADVPVATNDPDEEVQEETRGRFHLLWDPRRKNCSLSIRDARRRDNAAYFFRLKSKWMKYGYTSSKLSVRVMALTHRPNISIPGTLESGHPSNLTCSVPWVCEQGTPPIFSWMSAAPTSLGPRTTQSSVLTITPRPQDHSTNLTCQVTFPGAGVTMERTIQLNVSYAPQKVAISIFQGNSAAFKILQNTSSLPVLEGQALRLLCDADGNPPAHLSWFQGFPALNATPISNTGVLELPQVGSAEEGDFTCRAQHPLGSLQISLSLFVHWKPEGRAGGVLGAVWGASITTLVFLCVCFIFRVKTRRKKAAQPVQNTDDVNPVMVSGSRGHQHQFQTGIVSDHPAEAGPISEDEQELHYAVLHFHKVQPQEPKVTDTEYSEIKIHK

SEQ ID NO: 52 - protein, 626 aa, Homo sapiens
MIFLTALPLFWIMISASRGGHWGAWMPSSISAFEGTCVSIPCRFDFPDELRPAVVHGVWYFNSPYPKNYPPVVFKSRTQVVHESFQGRSRLLGDLGLRNCTLLLSNVSPELGGKYYFRGDLGGYNQYTFSEHSVLDIVNTPNIVVPPEVVAGTEVEVSCMVPDNCPELRPELSWLGHEGLGEPAVLGRLREDEGTWVQVSLLHFVPTREANGHRLGCQASFPNTTLQFEGYASMDVKYPPVIVEMNSSVEAIEGSHVSLLCGADSNPPPLLTWMRDGTVLREAVAESLLLELEEVTPAEDGVYACLAENAYGQDNRTVGLSVMYAPWKPTVNGTMVAVEGETVSILCSTQSNPDPILTIFKEKQILSTVIYESELQLELPAVSPEDDGEYWCVAENQYGQRATAFNLSVEFAPVLLLESHCAAARDTVQCLCVVKSNPEPSVAFELPSRNVTVNESEREFVYSERSGLVLTSILTLRGQAQAPPRVICTARNLYGAKSLELPFQGAHRLMWAKIGPVGAVVAFAILIAIVCYITQTRRKKNVTESPSFSAGDNPPVLFSSDFRISGAPEKYESERRLGSERRLLGLRGEPPELDLSYSHSDLGKRPTKDSYTLTEELAEYAEIRVK

SEQ ID NO: 53 - protein, 551 aa, Homo sapiens
MLPLLLLPLLWGGSLQEKPVYELQVQKSVTVQEGLCVLVPCSFSYPWRSWYSSPPLYVYWFRDGEIPYYAEVVATNNPDRRVKPETQGRFRLLGDVQKKNCSLSIGDARMEDTGSYFFRVERGRDVKYSYQQNKLNLEVTALIEKPDIHFLEPLESGRPTRLSCSLPGSCEAGPPLTFSWTGNALSPLDPETTRSSELTLTPRPEDHGTNLTCQMKRQGAQVTTERTVQLNVSYAPQTITIFRNGIALEILQNTSYLPVLEGQALRLLCDAPSNPPAHLSWFQGSPALNATPISNTGILELRRVRSAEEGGFTCRAQHPLGFLQIFLNLSVYSLPQLLGPSCSWEAEGLHCRCSFRARPAPSLCWRLEEKPLEGNSSQGSFKVNSSSAGPWANSSLILHGGLSSDLKVSCKAWNIYGSQSGSVLLLQGRSNLGTGVVPAALGGAGVMALLCICLCLIFFLIVKARRKQAAGRPEKMDDEDPIMGTITSGSRKKPWPDSPGDQASPPGDAPPLEEQKELHYASLSFSEMKSREPKDQEAPSTTEYSEIKTSK

SEQ ID NO: 54 - protein, 364 aa, Homo sapiens
MPLLLLLPLLWAGALAMDPNFWLQVQESVTVQEGLCVLVPCTFFHPIPYYDKNSPVHGYWFREGAIISGDSPVATNKLDQEVQEETQGRFRLLGDPSRNNCSLSIVDARRRDNGSYFFRMERGSTKYSYKSPQLSVHVTDLTHRPKILIPGTLEPGHSKNLTCSVSWACEQGTPPIFSWLSAAPTSLGPRTTHSSVLIITPRPQDHGTNLTCQVKFAGAGVTTERTIQLNVTYVPQNPTTGIFPGDGSGKQETRAGLVHGAIGGAGVTALLALCLCLIFFIVKTHRRKAARTAVGSNDTHPTTGSASPKHQKNSKLHGPTETSSCSGAAPTVEMDEELHYASLNFHGMNPSKDTSTEYSEVRTQ

SEQ ID NO: 55 - protein, 467 aa, Homo sapiens
MLLLLLLPLLWGRERVEGQKSNRKDYSLTMQSSVTVQEGMCVHVRCSFSYPVDSQTDSDPVHGYWFRAGNDISWKAPVATNNPAWAVQEETRDRFHLLGDPQTKNCTLSIRDARMSDAGRYFFRMEKGNIKWNYKYDQLSVNVTALTHRPNILIPGTLESGCFQNLTCSVPWACEQGTPPMISWMGTSVSPLHPSTTRSSVLTLIPQPQHHGTSLTCQVTLPGAGVTTNRTIQLNVSYPPQNLTVTVFQGEGTASTALGNSSSLSVLEGQSLRLVCAVDSNPPARLSWTWRSLTLYPSQPSNPLVLELQVHLGDEGEFTCRAQNSLGSQHVSLNLSLQQEYTGKMRPVSGVLLGAVGGAGATALVFLSFCVIFIVVRSCRKKSARPAADVGDIGMKDANTIRGSASQGNLTESWADDNPRHHGLAAHSSGEEREIQYAPLSFHKGEPQDLSGQEATNNEYSEIKIPK

SEQ ID NO: 56 - protein, 524 aa, Homo sapiens
MYALFLLASLLGAALAGPVLGLKECTRGSAVWCQNVKTASDCGAVKHCLQTVWNKPTVKSLPCDICKDVVTAAGDMLKDNATEEEILVYLEKTCDWLPKPNMSASCKEIVDSYLPVILDIIKGEMSRPGEVCSALNLCESLQKHLAELNHQKQLESNKIPELDMTEVVAPFMANIPLLLYPQDGPRSKPQPKDNGDVCQDCIQMVTDIQTAVRTNSTFVQALVEHVKEECDRLGPGMADICKNYISQYSEIAIQMMMHMQPKEICALVGFCDEVKEMPMQTLVPAKVASKNVIPALELVEPIKKHEVPAKSDVYCEVCEFLVKEVTKLIDNNKTEKEILDAFDKMCSKLPKSLSEECQEVVDTYGSSILSILLEEVSPELVCSMLHLCSGTRLPALTVHVTQPKDGGFCEVCKKLVGYLDRNLEKNSTKQEILAALEKGCSFLPDPYQKQCDQFVAEYEPVLIEILVEVMDPSFVCLKIGACPSAHKPLLGTEKCIWGPSYWCQNTETAAQCNAVEHCKRHVWN

SEQ ID NO: 57 - protein, 527 aa, Homo sapiens
MYALFLLASLLGAALAGPVLGLKECTRGSAVWCQNVKTASDCGAVKHCLQTVWNKPTVKSLPCDICKDVVTAAGDMLKDNATEEEILVYLEKTCDWLPKPNMSASCKEIVDSYLPVILDIIKGEMSRPGEVCSALNLCESLQKHLAELNHQKQLESNKIPELDMTEVVAPFMANIPLLLYPQDGPRSKPQPKDNGDVCQDCIQMVTDIQTAVRTNSTFVQALVEHVKEECDRLGPGMADICKNYISQYSEIAIQMMMHMQDQQPKEICALVGFCDEVKEMPMQTLVPAKVASKNVIPALELVEPIKKHEVPAKSDVYCEVCEFLVKEVTKLIDNNKTEKEILDAFDKMCSKLPKSLSEECQEVVDTYGSSILSILLEEVSPELVCSMLHLCSGTRLPALTVHVTQPKDGGFCEVCKKLVGYLDRNLEKNSTKQEILAALEKGCSFLPDPYQKQCDQFVAEYEPVLIEILVEVMDPSFVCLKIGACPSAHKPLLGTEKCIWGPSYWCQNTETAAQCNAVEHCKRHVWN

SEQ ID NO: 58 - protein, 208 aa, Sus scrofa
ALLAEHLLKPLPADKQIETGPFLEAVSHLPPFFDCLGSPVFTPIKADISGNITKIKAVYDTNPAKFRTLQNILEVEKEMYGAEWPKVGATLALMWLKRGLRFIQVFLQSICDGERDENHPNLIRVNATKAYEMALKKYHGWIVQKIFQAALYAAPYKSDFLKALSKGQNVTEEECLEKVRLFLVNYTATIDVIYEMYTKMNAELNYKV

SEQ ID NO: 59 - protein, 209 aa, Homo sapiens
MALLAEHLLKPLPADKQIETGPFLEAVSHLPPFFDCLGSPVFTPIKADISGNITKIKAVYDTNPAKFRTLQNILEVEKEMYGAEWPKVGATLALMWLKRGLRFIQVFLQSICDGERDENHPNLIRVNATKAYEMALKKYHGWIVQKIFQAALYAAPYKSDFLKALSKGQNVTEEECLEKIRLFLVNYTATIDVIYEMYTQMNAELNYKV

SEQ ID NO: 60 - protein, 276 aa, Homo sapiens
MGNSMKSTPAPAERPLPNPEGLDSDFLAVLSDYPSPDISPPIFRRGEKLRVISDEGGWWKAISLSTGRESYIPGICVARVYHGWLFEGLGRDKAEELLQLPDTKVGSFMIRESETKKGFYSLSVRHRQVKHYRIFRLPNNWYYISPRLTFQCLEDLVNHYSEVADGLCCVLTTPCLTQSTAAPAVRASSSPVTLRQKTVDWRRVSRLQEDPEGTENPLGVDESLFSYGLRESIASYLSLTSEDNTSFDRKKKSISLMYGGSKRKSSFFSSPPYFED

SEQ ID NO: 61 - protein, 18 aa, Homo sapiens
KRFKQDGGWSHWSPWSSC

SEQ ID NO: 62 - protein, 18 aa, Homo sapiens
KRAKAAGGWSHWSPWSSC

SEQ ID NO: 63 - DNA, 1784 bp, Staphylococcus aureus
  CDS (184)..(1635)
tcgaaatagcgtgattttgcggttttaagccttttacttcctgaataaatctttcagcaaaatatttattttataagttgtaaaacttacctttaaatttaattataaatatagattttagtattgcaatacataattcgttatattatgatgactatacaaatacatacagggggtattaatttgaaaaagaaaaacatttattcaattcgtaaactaggtgtaggtattgcatctgtaactttaggtacattacttatatctggtggcgtaacacctgctgcaaatgctgcgcaacacgatgaagctcaacaaaatgctttttatcaagtcttaaatatgcctaacttaaatgctgatcaacgcaatggttttatccaaagccttaaagatgatccaagccaaagtgctaacgttttaggtgaagctcaaaaacttaatgactctcaagctccaaaagctgatgcgcaacaaaataacttcgacaaagatcaacaaagcgccttctatgaaatcttgaacatgcctaacttaaacgaagcgcaacgtaacggcttcattcaaagtcttaaagacgacccaagccaaagcactaacgttttaggtgaagctaaaaaattaaacgaatctcaagcaccgaaagctgataacaatttcaacaaagaacaacaaaatgctttctatgaaatcttgaatatgcctaacttaaacgaagaacaacgcaatggtttcatccaaagcttaaaagatgacccaagccaaagtgctaacctattgtcagaagctaaaaagttaaatgaatctcaagcaccgaaagcggataacaaattcaacaaagaacaacaaaatgctttctatgaaatcttacatttacctaacttaaacgaagaacaacgcaatggtttcatccaaagcctaaaagatgacccaagccaaagcgctaaccttttagcagaagctaaaaagctaaatgatgctcaagcaccaaaagctgacaacaaattcaacaaagaacaacaaaatgctttctatgaaattttacatttacctaacttaactgaagaacaacgtaacggcttcatccaaagccttaaagacgatccttcggtgagcaaagaaattttagcagaagctaaaaagctaaacgatgctcaagcaccaaaagaggaagacaataacaagcctggcaaagaagacaataacaagcctggcaaagaagacaataacaagcctggcaaagaagacaacaacaagcctggcaaagaagacaacaacaagcctggtaaagaagacaacaacaagcctggcaaagaagacggcaacaagcctggtaaagaagacaacaaaaaacctggtaaagaagatggcaacaagcctggtaaagaagacaacaaaaaacctggtaaagaagacggcaacaagcctggcaaagaagatggcaacaaacctggtaaagaagatggtaacggagtacatgtcgttaaacttggtgatacagtaaatgacattgcaaaagcaaacggcactactgctgacaaaattgctgcagataacaaattggctgataaaaacatgatcaaacttggtcaagaacttgttgttgataagaagcaaccacaaaccatgcagagctaacaaagctcaagcattatcagaaactggcgaagaaaatccattcatcggtacaactgtatttggtggattatcattagccttaggtgcagcgttattagctggacgtcgtcgcgaactataaaaacaaacaatacacaacgatagatatc

SEQ ID NO: 64 - protein, 483 aa, Staphylococcus aureus
LKKKNIYSIRKLGVGIASVTLGTLLISGGVTPAANAAQHDEAQQNAFYQVLNMPNLNADQRNGFIQSLKDDPSQSANVLGEAQKLNDSQAPKADAQQNNFDKDQQSAFYEILNMPNLNEAQRNGFIQSLKDDPSQSTNVLGEAKKLNESQAPKADNNFNKEQQNAFYEILNMPNLNEEQRNGFIQSLKDDPSQSANLLSEAKKLNESQAPKADNKFNKEQQNAFYEILHLPNLNEEQRNGFIQSLKDDPSQSANLLAEAKKLNDAQAPKADNKFNKEQQNAFYEILHLPNLTEEQRNGFIQSLKDDPSVSKEILAEAKKLNDAQAPKEEDNNKPGKEDNNKPGKEDNNKPGKEDNNKPGKEDNNKPGKEDNNKPGKEDGNKPGKEDNKKPGKEDGNKPGKEDNKKPGKEDGNKPGKEDGNKPGKEDGNGVHVVKLGDTVNDIAKANGTTADKIAADNKLADKNMIKLGQELVVDKKQPQTMQS

SEQ ID NO: 65 - DNA, 279 bp, Homo sapiens
  CDS (1)..(279)
gtgaagcccaaggcctggctgtcccgtggccccagtcctggccctggccgtctgctgctggtgtgccatgtctcaggattctacccaaagcctgtatgggtgaagtggatgcggggtgagcaggagcagcagggcactcagccaggggacatcctgcccaatgctgacgagacatggtatctccgagcaaccctggatgtggtggctggggaggcagctggcctgtcctgtcgggtgaagcacagcagtctagagggccaggacatcgtcctctactgg

SEQ ID NO: 66 - protein, 93 aa, Homo sapiens
VKPKAWLSRGPSPGPGRLLLVCHVSGFYPKPVWVKWMRGEQEQQGTQPGDILPNADETWYLRATLDVVAGEAAGLSCRVKHSSLEGQDIVLYW

SEQ ID NO: 67 - DNA, 1873 bp, Mus musculus
  CDS (173)..(175)
  CDS (273)..(314)
  CDS (315)..(1367)
aggaagggacagggtgacaccccaggattacataaatttacaggggctgccgaattggtcgaacaagcccgtggaacctggaagccagagaacaccatcgctgtaaaggaaagaaactgaagcttttctcggagcctatctgggctgctcaaactttcagaatctaccgaccatggtgagtcagacagactgtcttggggtggaactggagccaacctgaggaatctcagggtcctggcaggagtctccctgtccccctactttctcctcaggagcgtgtgcttggcttgttgctgttgcttctggtgcacgcctctcccgccccaccagagccctgcgagctagacgaggaaagttgctcctgcaacttctcagatccgaagccagattggtccagcgctttcaattgtttgggggcggcagatgtggaattgtacggcggcggccgcagcctggaataccttctaaagcgtgtggacacggaagcagatctggggcagttcactgatattatcaagtctctgtccttaaagcggcttacggtgcgggccgcgcggattcctagtcggattctattcggagccctgcgtgtgctcgggatttccggcctccaggaactgactcttgaaaatctcgaggtaaccggcaccgcgccgccaccgcttctggaagccaccggacccgatctcaacatcttgaacctccgcaacgtgtcgtgggcaacaagggatgcctggctcgcagaactgcagcagtggctaaagcctggactcaaggtactgagtattgcccaagcacactcactcaacttttcctgcgaacaggtccgcgtcttccctgccctctccaccttagacctgtctgacaatcctgaattgggcgagagaggactgatctcagccctctgtcccctcaagttcccgaccctccaagttttagcgctgcgtaacgcggggatggagacgcccagcggcgtgtgctctgcgctggccgcagcaagggtacagctgcaaggactagaccttagtcacaattcactgcgggatgctgcaggcgctccgagttgtgactggcccagtcagctaaactcgctcaatctgtctttcactgggctgaagcaggtacctaaagggctgccagccaagctcagcgtgctggatctcagttacaacaggctggataggaaccctagcccagatgagctgccccaagtggggaacctgtcacttaaaggaaatccctttttggactctgaatcccactcggagaagtttaactctggcgtagtcaccgccggagctccatcatcccaagcagtggccttgtcaggaactctggctttgctcctaggagatcgcctctttgtttaaggaacatttgcatcctcctggtttctgagggtcctcgtcaacgaatcctctgctttaaatttattaaaatcttaatccacgatgtaaggaaagaaaggcagtcaagatggttcagtgggtaaaagccagcaaacttgacccctgattttaaccctcaggatccacacggaaggggaaaactcactcctgaaagttgtccatctgtgctcacaaataaatattttttaaaataacaatgtgtttgttggttttgtttttgtttgggttttgttgtggttttgtttgttttgttttgtttttgagacagtctggctatgtatccttggctggcctcaaactcataaagatcaagatcggcctgcctctacctccaaatgctctggttaaagggatgtgcctccatgcccagttgaagtcatcctgaaccacgagtccaggccactcactctttactaagatctttactaagtatctgccataggtcaggctcagtgctaaatgag

SEQ ID NO: 68 - protein, 366 aa, Mus musculus
MERVLGLLLLLLVHASPAPPEPCELDEESCSCNFSDPKPDWSSAFNCLGAADVELYGGGRSLEYLLKRVDTEADLGQFTDIIKSLSLKRLTVRAARIPSRILFGALRVLGISGLQELTLENLEVTGTAPPPLLEATGPDLNILNLRNVSWATRDAWLAELQQWLKPGLKVLSIAQAHSLNFSCEQVRVFPALSTLDLSDNPELGERGLISALCPLKFPTLQVLALRNAGMETPSGVCSALAAARVQLQGLDLSHNSLRDAAGAPSCDWPSQLNSLNLSFTGLKQVPKGLPAKLSVLDLSYNRLDRNPSPDELPQVGNLSLKGNPFLDSESHSEKFNSGVVTAGAPSSQAVALSGTLALLLGDRLFV

SEQ ID NO: 69 - protein, 365 aa, Mus musculus
MDKFWWHTAWGLCLLQLSLAHPHQQIDLNVTCRYAGVFHVEKNGRYSISRTEAADLCQAFNSTLPTMDQMKLALSKGFETCRYGFIEGNVVIPRIHPNAICAANHTGVYILVTSNTSHYDTYCFNASAPPEEDCTSVTDLPNSFDGPVTITIVNRDGTRYSKKGEYRTHQEDIDASNIIDDDVSSGSTIEKSTPESYILHTYLPTEQPTGDQDDSFFIRSTLATRDRDSSKDSRGSSRTVTHGSELAGHSSANQDSGVTTTSGPMRRPQIPEWLIILASLLALALILAVCIAVNSRRRCGQKKKLVINGGNGTVEDRKPSELNGEASKSQEMVHLVNKEPSETPDQCMTADETRNLQSVDMKIGV

SEQ ID NO: 70 - protein, 371 aa, Mus musculus
MNVKGKVILLMLIVSTVVVVFWEYVNSPDGSFLWIYHTKIPEVGENRWQKDWWFPSWFKNGTHSYQEDNVEGRREKGRNGDRIEEPQLWDWFNPKNRPDVLTVTPWKAPIVWEGTYDTALLEKYYATQKLTVGLTVFAVGKYIEHYLEDFLESADMYFMVGHRVIFYVMIDDTSRMPVVHLNPLHSLQVFEIRSEKRWQDISMMRMKTIGEHILAHIQHEVDFLFCMDVDQVFQDNFGVETLGQLVAQLQAWWYKASPEKFTYERRELSAAYIPFGEGDFYYHAAIFGGTPTHILNLTRECFKGILQDKKHDIEAQWHDESHLNKYFLFNKPTKILSPEYCWDYQIGLPSDIKSVKVAWQTKEYNLVRNNV

SEQ ID NO: 71 - DNA, 79 bp, Homo sapiens
  CDS (3)..(77)
gcagtttaacgggggaggggactcagccccagcattttggtgatgggactcgactctccatcctagaggacctgaacaa

SEQ ID NO: 72 - protein, 25 aa, Homo sapiens
SLTGEGTQPQHFGDGTRLSILEDLN

SEQ ID NO: 73 - DNA, 1197 bp, Streptococcus pyogenes
  CDS (106)..(1119)
attggctctggagatggattataaagagattgcagatgccaaaggtgcaactatcacaggggcatggtcagacagtccacaaattatattagacggaggtaaaaaatgagtgaaaatataccgctgcgagtccaatttaagcgcatgaaagccgccgagtgggctcgtagtgatgtcatcttactggagagcgagataggctttgagacagacacaggttttgccagagcaggtgatgggcacaatcgatttagtgaccttggatacattagtccactcgattacaatctactgactaacaagccaaatattgatggattagcgacaaaagtcgagaccgctcagaaactacaacaaaaagcagataaagagaccgtctatacaaaagctgaatcgaagcaagagcttgacaagaaattaaatctcaaaggtggcgttatgacaggtcaactaaaatttaagccagccgccactgttgcttattcctcgtcaacgggtggagcggtcaatattgacttgtcgtctaccagaggtgctggtgttgttgtctattctgacaatgataccagtgatgggccgttaatgagcttgcggacgggtaaagagacctttaatcaatcggcgctttttgtcgactataaggggacaacaaatgccgttaatattgcgatgcgtcacgcaaccacccccaatttttcatcggcgcttaatattactagcggcaatgaaaatggtagtgcaatgcagctacgagggtcagaaaaagcgctaggaacgctaaaaattactcatgagaacccaagtattggagcggattatgataaaaatgcggcacgttatccattgatattgtcaaaaagacaaaacggtgcaggaacagccgctcagggaatctacattaactcaacctcaggcacgacagggaagttgcttaggattagaaaccttagtgatgataagttctacgtcaagtctgacggtggtttttatgccaaggaaacttcgcagattgatggcaacctgaaactcaaggaccccacagcgaatgatcatgcggcaaccaaagcttatgtagataaagcaatttctgagttaaaaaaactcatactaaaaaaatagattaaggaggataaatgagcagagacccaacacttattttagacgagtcaaacctcgttattggtaaggatggacgtg

SEQ ID NO: 74 - protein, 337 aa, Streptococcus pyogenes
MSENIPLRVQFKRMKAAEWARSDVILLESEIGFETDTGFARAGDGHNRFSDLGYISPLDYNLLTNKPNIDGLATKVETAQKLQQKADKETVYTKAESKQELDKKLNLKGGVMTGQLKFKPAATVAYSSSTGGAVNIDLSSTRGAGVVVYSDNDTSDGPLMSLRTGKETFNQSALFVDYKGTTNAVNIAMRHATTPNFSSALNITSGNENGSAMQLRGSEKALGTLKITHENPSIGADYDKNAARYPLILSKRQNGAGTAAQGIYINSTSGTTGKLLRIRNLSDDKFYVKSDGGFYAKETSQIDGNLKLKDPTANDHAATKAYVDKAISELKKLILKK

SEQ ID NO: 75 - DNA, 1497 bp, Bacteriophage T270
  CDS (286)..(1374)
gaagacattgtaaaatacaatacaattatgagagatcaatataaaaaaggtagcaatgaatataatgcgtttcaacaagatattgagcaagataaaaaccagatagcactattgttcaacgaacatcaattgcttgaaaatatcgataattagttaatctaaaacaaaaagccccacgctctcaaagtttggcgactctgagcgtgaggcaagacagtataagaaacaaccattaaaaaggtcattttcttgtacctattttatcaaattgaaagatggtatgcaatgaaaattaaatcatataaaaaggaaaatggtgaaactgcttataaatttcttttgtatgccggttatgttaatggaaagagaaaatatattaggcgagaaggtttcaaaactaagcaggctgcaagggaaaccttaattagtttacaagctgaacttgataaacctaaatcaagtatgacatttggagcattgacagatcaatggctaaaggaatatgaaaaaaccgttcagggcagtacctacttaaaaacagaaagaaatattaataaacatattttgccaaaacttgataaagtgaagattggagacatcaatccactacttatccagcggcttactgaagaatggtgcaacgatttaaaatatggaggaaaaattcttgggcttgttaggaatatcttaaatctagctgttagatacggatatatcaataacaatccagctttgccaattacacctccaaaaataaaaaggaaaagaaaaatgaataataatttttatacacttgatcaacttaaacaattccttgaactagttgaaaaaactgacaacattgaaaaaatagccttgtttagattattagcatttactggaatacgaaaaggggagcttctggcactaacttgggatgatttgaatggtaatactctatcaattaataaagctgtcacacgtactcaagttggactagaaatagatgttacgaagacaaaatcaagcgatagattaatcagcttagatgatgaaactttggaaattttacaagaacttcatgaaacttttcctacttctactcttatgttccaatctaaatcaggtggaattatgacgccaagtttaccacgaaaatggctattgcaaattatcaaagggatagacttaccacaaatcacaattcatggtttcaggcacactcatgcaagcttacttttcgaatcaggtctatccttgaaacaggtgcaacatagattagggcatggagatttacagacaactatgaacgtatatactcacatcacgcaatcggcaattgatgacattggaactaaattcaatcaatttgttactaacaagcaactagattgacaactaattctcaacaaacgttaatttaacaacattcaagtaactcccaccagctccatcaatgcttaccgtaagtaatcataacttactaaaaccttgttacatcaaggttttttctttttg

SEQ ID NO: 76 - protein, 362 aa, Bacteriophage T270
MKIKSYKKENGETAYKFLLYAGYVNGKRKYIRREGFKTKQAARETLISLQAELDKPKSSMTFGALTDQWLKEYEKTVQGSTYLKTERNINKHILPKLDKVKIGDINPLLIQRLTEEWCNDLKYGGKILGLVRNILNLAVRYGYINNNPALPITPPKIKRKRKMNNNFYTLDQLKQFLELVEKTDNIEKIALFRLLAFTGIRKGELLALTWDDLNGNTLSINKAVTRTQVGLEIDVTKTKSSDRLISLDDETLEILQELHETFPTSTLMFQSKSGGIMTPSLPRKWLLQIIKGIDLPQITIHGFRHTHASLLFESGLSLKQVQHRLGHGDLQTTMNVYTHITQSAIDDIGTKFNQFVTNKQLD

SEQ ID NO: 77 - DNA, 2187 bp, Staphylococcus aureus
  CDS (752)..(1744)
atcgataactttctttgttccatttttaaagtaaacagtatatttcgcttgcttcgatagtcttaaatctatatcactaatacctctgtctgattttaaaactgatttaactctatcctctaaatctttataactaatattttgattcttattaaatgttaagcttgataaaatattttggcttgtaccgttcacagtgattgcatatggaacatggactttagaatatccatggtgtaacgaacttgatgatttatctaatggcttagctgcggcagacgcttcattattattaaagtttgcacctgttgatgctaaaacacctaatgctaaagttgttgtaatcaatgacttaaatttcataaattatctctccttttttgtgtaattcgtatttgcaacttaattatagccagactttctctattttttgaattaactgaatattaataataaattatctttaacaataattttttaacactgttaaaagttcttttaattttgattaactaattaatttacaatacctaaaatgttgtttggttttgtttataccaagcttcaaacttaaatgtcataacaacattcatttcttaattccgattagatttgtcgattatatttacagcatctttatactcaaaaaacatttacttaaaaatataaattctatttaataattaatttaaatttagttaatcaattttgcatctattttgttgtaagctatataaaaggagtgataatgatggtgaaaaaaacaaaatccaattcactaaaaaaagttgcaacacttgcattagcaaatttattattagttggtgcacttactgacaatagtgccaaagccgaatctaagaaagatgatactgatttgaagttagttagtcataacgtttatatgttatcgaccgttttgtatccaaactgggggcaatataaacgcgctgatttaatcggacaatcttcttatattaaaaataatgatgtcgtaatattcaatgaagcatttgataatggtgcatcagacaaattattaagtaatgtgaaaaaagaatatccttatcaaacacctgtactcggccgttctcaatcagggtgggacaaaactgaaggtagctactcatcaactgttgcagaagatggtggcgtagcgattgtaagtaaatatcctattaaagaaaaaatccagcatgttttcaaaagcggttgtggattcgataatgatagcaacaaaggctttgtttatacaaaaatagagaaaaatggtaagaacgttcacgttatcggtacacatacacaatctgaagattcacgttgtggtgctggacatgatcgaaaaattagagctgaacaaatgaaagaaatcagtgactttgttaaaaagaaaaatatccctaaagatgaaacggtatatataggtggcgaccttaatgtcaataaaggcactccagagttcaaagatatgcttaaaaacttgaatgtaaatgatgttctatatgcaggtcataatagcacatgggaccctcaatcaaattcaattgcgaaatataattaccctaatggtaaaccagaacatttagactatatatttacagataaagatcataaacaaccaaaacaattagtcaatgaagttgtgactgaaaaacctaagccatgggatgtatatgcgttcccatattactacgtttacaatgatttttcagatcattacccaatcaaagcctatagtaaatagtgctcaactaactaataactttgcttcgttctaaaaggacgaagcgagttatattgttaaaatttgaattgacttacattttaataaaatcatcttaacaactttaatttttcattaatacaagtctttactctacactcaaacaagattcatacactgcacgtcataataaatctatctattcaaatataaataaaagttacctactacattctatgtagcaggcaacttttattacttatttcttttcattatcattaagtacttttacaaacttcacattatgtgtcttccaatcaacttcatataatgctgataatttttcttcttttttatctacatggttttcaccagaccaatagccccagaaaccatggcgattccaatctattttaaactcatccattgatcgtttaactctaacgtgtcgcatggaaatcgat

SEQ ID NO: 78 - protein, 330 aa, Staphylococcus aureus
MVKKTKSNSLKKVATLALANLLLVGALTDNSAKAESKKDDTDLKLVSHNVYMLSTVLYPNWGQYKRADLIGQSSYIKNNDVVIFNEAFDNGASDKLLSNVKKEYPYQTPVLGRSQSGWDKTEGSYSSTVAEDGGVAIVSKYPIKEKIQHVFKSGCGFDNDSNKGFVYTKIEKNGKNVHVIGTHTQSEDSRCGAGHDRKIRAEQMKEISDFVKKKNIPKDETVYIGGDLNVNKGTPEFKDMLKNLNVNDVLYAGHNSTWDPQSNSIAKYNYPNGKPEHLDYIFTDKDHKQPKQLVNEVVTEKPKPWDVYAFPYYYVYNDFSDHYPIKAYSK

SEQ ID NO: 79 - DNA, 17276 bp, Streptococcus agalactiae
  CDS (7062)..(8207)
acaatctcaggactgtttatttttatgattaaacgaaacttcctctaataaatagtcaataaatttttgtcccatttttgaaaggtttgctttgtcgtgtcggatatagacaatatcaataacatcatccacgtcaagagggattgcgacaatttcgtcaccgttcaattttgagttgaggataccagttgccactgtataaccatctaatccaatcattaaattaaacagagttgctctatcactgacaacaatggattttgggtgaggaatttgagacatcatttcctcagaaaagtagaaagaattatgcaggccttgatcataactcagataaggataatcttctaaatctttcatacttaatttttttctattagctaagggattggatttgctcacgaaaatatgaggtgtagtagtaaaaagagttgtggcaattaaggaattatcgtcgaataatttggttaatacatctctattatagctattaagaaacagaacaccaatctctgaacggaaatttttaacatcatcaataatttcccaagtcctagtttcacgtaaaaaaagttcgtattgggtcatgtctgtgccattaaagagagctacaaaagcgttaaccacaaatgcatagtgttgtgaagaaacgctgaacagctcacgacttgtattatcacccttataacgctcttcaagaagtgctgtttgttctagaatttgtcgcgcatatgacagaaattccataccatcttttgttaacgttattccttttggatttcgaataaaaatttggatacccatctcagtctcaaggttcctaacagcgtttgaaagtgaaggttgggtaatgtagagttgtttagcggcttcattcatgctaccagtttctacaatcttaataacatattgtaattgttgaattctcataattctagtttaaactagaatgtaaataaattcaattagatcagctaaattatcaatatagatcaattgaaaatgttatttagctaatataatcagattattccaatattattttcgttgaatattgtattgaaaaatgatataatatccaagtaaaattaaggtttttttaagtattggagaattacaatgtctaatcattcgcgccgtcaccaaaagaaacactcacatacacctctacgggtgattaatttatttcttttggtgatttttattttgttaagtgtagtctcattatttcttatgtatcgtcaccattttttggcatttagacacttgaacgtcatttatggagttgtaattattttaatcattttagcaagtttatttctttgtattaagaataaagctagaatttttacaactataattttagtactatcctctattttcgttgctactactttatatggatttaagtcaaccattgatttgacaaataatctaaataaaactgcttcatactctgaaattgagatgagtgtagttgtaccaaaagattctaaaataaccaatatagaagctgtcagcaaattagccgcaccagttaaaaacgatacttcaaatattactgatttgatagaacatataaaatcagaaaaaggaatctctattacaccacaaaaaacagattcttaccaggatgcatacaatagaattaaaaatggtgatagtcaagctatggttttaaataatgcttatgttagcttaattgaacttagtacccctgattttaaatcgcagataaaaacgatttatacttacaaaattaagaaaaaaattaatcgtaaaaatactaatcataaagaaggggtatttaatatctatattagcggtattgatacttttggctctatatcaacagtatcaagatctgatgtaaatattattatgacggttaataccaatacccacaaagtattgttaacgacaacaccacgagatgcctatgtaaaaattccagatggtgggggcaatcaatatgataaattaacccatgcaggtttgtatggtgttgagacatcaatgaaaacacttgaaaacctttacgacatcaaccttgattattatgctagaattaatttttcatcattttttaaaattaatagacctcttgggaggagtgacagtttatatacgatcaagcttttacaagtaaacatggtaattttggactttcctgttggtcaagtaacattgaattctgagcaggctttgggctttgttagagaacgttattctctacaaggaggcgataacgatagaggtagaaatcaagaaaaagtgattgcagctattataaataagttagcttctagtcagtcagtaacaaaattaaatagcattacctcacagctccaaacgtccgttcaaactaatatgactattgataatattaatgatttgattaacaatcaattgtcaactggacaacgcttcactgtcgagtcacaagcattaactggtcatggttcaacgggtgaactcccttcatatgcaatgccaggagctcaactttatatgatgtcaattgatcaatctagcttatctaatgcaaaatcaaaaattaagaacacaatggaggaataacaagaatgattgatattcattctcatatcgtttttgatgtagatgatgggcccaaaacgcttgaagagagtttatctttaatagaagaaagttatcgacaaggtgttagaataattgtttcgacatcacatagaagaaaaggtatgtttgaaacacctgaagatattatcttcaaaaacttttctatagttaaacacgaaacggaaaaaagatttgaacatcttcaaatcttatatggtggagaattatactatacaagtgatatgttagaaaaactgaagttaaagcaaattccaactttaaacaatacgaaatttgctttaattgaattttctatgcaaacttcttggaaagatattcatacagctttgtcaaatgttttaatgcttggtattacaccagtcgttgcgcatatagagaggtataacgctttagagaatcaaaaagaacgggtgaaggaaattattaatatggggtgttacacacaaataaatagtttccatattttgaaacaaaaactttttaatgataagcataaacgctttaagaaaagagcccgttattttttagaggaaaatttagtgcattttgtagcgagtgatatgcataaccttgatgttagaccgccatttttagcagaagcttataagattatctgtagagatttcggtaaagaacgtgctaaccaactttttattgaaaatgctcaatctatattaaaaaaccattacatttaggagatttcatgaataaaatagctaatacagaagttgaaataaatatattcaaccttttaaaaaaattgtggaaaaagaaatttttaatcacatttgttgccattgcgtttgcaacagctggacttttctatagtctttttattgttacgccacaatatacttcttcaacaaggatatatgtcattaaccctaatacccctaataatagtattactgcacaagatctacaagcggggagttttcttgcaaatgactataaggagattattacgtctactgacgttctagaaaaagttatttcttctgaaaaattgaattatccttcgtctcagttgctacaaaaaataacagtttctattttaaaagatacacgtgttatttcaatatcggtcgaagatgctaatccaaaaatgtctcaaaaattagcaaattcagttagagaagcagcagtttcaaaaatcaaggcagttactcaagtagaggatatcactactcttgagaagggaaatttacctaaagcaccatcttctcctaatattaaaaagaatgtactaatcgggtttattgttggtgcaggattatcaactattgttttagttattatggggattttggatgatcgtgttaatactgaagaagatattgaaaaggtcttaggacttacttctttaggtatagtaccagatttgaataaactttaaggagaatataatgactcgtttagaaatagttgatagcaagttaagacaagcaaaaaaaacagaagaatacttcaatgcgatccgtacaaacatacagtttagtggaaaggaaaataaaattcttgcaattgcctctgttagggaaggggaaggaaaatccactacttcaacaagtttagctttatctttagctcaagcaggatttaaaacattattaattgatgcggatactaggaactctgttatgtctggaacctttaaagcaactggaactattaaaggcttgacgaattatttatcaggtaatgcagatcttggagatattatctgtgaaaccaatgttcctagactgatggtcgttccttcaggaaaagtaccaccaaatccaacagcattacttcagaacgcttattttaataagatgattgaagctattaaaaatatatttgattatattatcatcgatactccacctattggtttagttgttgatgccgcaataatcgctaatgcttgcgatggttttattttagtaacccaagcaggcagaataaaacgtaattatgttgaaaaagcaaaagaacagatggaacaaagtggttcaaagttcttaggtattattcttaataaagttaatgaatctgttgctacttacggcgattatggaaattacggaaaaagggatagaaaaaggaagtaagggactctggtattgaaagaaaaagaaaatatacaaaagattattatagcgatgattcaaacagttgtagtttatttttctgcaagtttgacattaacattaattactcccaattttaaaagcaataaagatttattgtttgttctattgatacattatattgttttttatctttctgatttttacagagacttttggagtcgtggctatcttgaagagtttaaaatggtattgaaatacagcttttactatattttcatatcaagttcattattttttatttttaaaaactcttttacaacgacacgactttccttttttacttttattgctatgaattcgattttattatatctattgaattcatttttaaaatattatcgaaaatattcttacgctaagttttcacgagataccaaagttgttttgataacgaataaggattctttatcaaaaatgacctttaggaataaatacgaccataattatatcgctgtctgtatcttggactcctctgaaaaggattgttatgatttgaaacataactcgttaaggataataaacaaagatgctcttacttcagagttaacctgcttaactgttgatcaagcttttattaacatacccattgaattatttggtaaataccaaatacaagatattattaatgacattgaagcaatgggagtgattgtcaatgttaatgtagaggcacttagctttgataatataggagaaaagcgaatccaaacttttgaaggatatagtgttattacatattctatgaaattctataaatatagtcaccttatagcaaaacgatttttggatatcacgggtgctattataggtttgctcatatgtggcattgtggcaatttttctagttccgcaaatcagaaaagatggtggaccggctatcttttctcaaaatagagtaggtcgtaatggtaggatttttagattctataaattcagatcaatgcgagtagatgcagaacaaattaagaaagatttattagttcacaatcaaatgacagggctaatgtttaagttagaagatgatcctagaattactaaaataggaaaatttattcgaaaaacaagcatagatgagttgcctcaattctataatgttttaaaaggcgatatgagtttagcaggaacacgccctcccacagttgatgaatatgaaaagtataattcaacgcagaagcgacgccttagttttaagccaggaatcactggtttgtggcaaatatctggtagaaataatattactgattttgatgaaatcgtaaagttagatgttcaatatatcaatgaatggtctatttggtcagatattaagattattctcctaacactaaaggtagttttactcgggacaggagctaagtaaaggtaaggtttgaaaggaatataatgaaaatttgtctggttggttcaagtggtggtcatctagcacacttgaaccttttgaaacccatttgggaaaaagaagataggttttgggtaacctttgataaagaagatgctaggagtattctaagagaagagattgtatatcattgcttctttccaacaaaccgtaatgtcaaaaacttggtaaaaaatactattctagcttttaaggtccttagaaaagaaagaccagatgttatcatatcatctggtgccgctgtagcagtaccattcttttatattggtaagttatttggttgtaagaccgtttatatagaggttttcgacaggatagataaaccaactttgacaggaaaattagtgtatcctgtaacagataaatttattgttcagtgggaagaaatgaaaaaagtttatcctaaggcaattaatttaggaggaattttttaatgatttttgtcacagtggggacacatgaacagcagttcaaccgtcttattaaagaagttgatagattaaaagggacaggtgctattgatcaagaagtgttcattcaaacgggttactcagacttcgaacctcagaattgtcagtggtcaaaatttctctcatatgatgatatgaactcttacatgaaagaagctgagattgttatcacacatggcggcccagcgacgtttatgtcagttatttctttagggaaattaccagttgttgttcctaggagaaagcagtttggtgaacatatcaatgatcatcaaatacaatttttaaaaaaaattgcccacctgtatcccttggcttggattgaagatgtagatggacttgcggaagcgttgaaaaggaatatagctacagaaaaatatcagggaaataatgatatgttttgtcataaattagaaaaaattataggtgaaatatgaggaaatatctagatttagattattctttattttatgctctttgggtacttattttagtaccaaaccaatggtatcagtttttaattattaccattatagttctattattactttggaagagtgagtttagaatatctataagcaattcttcaatactatttctgctttggttatttatttatttatttgcaatactcattagaggtactcaagaggatataacgtttcagcgatttattgctgagctattaaaactaattagtacaggatatgctttatttttttataattattatagaaaagctgattttaatagttcagttgtaaggaatgtggtaaaggttaactattttgtgttgtttcttataacagttttatatttattttttcctatgctgaagccaactttatttggaagagaattgttttcaatagagtggtttccacatatgagaataagacttgcggcatattttgaatatgctacactaattggtcagtttattttattttcttatcccatactttttttgaaaccccaaaaacatatggaaaatattttaatatccttactgttgactatatgttcatacttttctggcgctagaatactattggtctgtatgttggttttattagcatcgcttcttttagattatatcctttttaaaactaatttgaaattgaccaagaaaaacacttttatacttggtatgactttcttatttatcaccgcttgtttttcttataacatatggtcaataattgaaaaaataattatgtacagaaaccaaagtactatcactaggatgatagtttatcaagaaagtattattgaagttctaaaaggaaatattttatttggacagggtataaggattccatcaagtgaaggaatattcctaggatcgcattctacttatattagtgtcttttacaggacttctttattaggaattgttctttatttttctgcctttatacttttatataaagaagcgatttcaaaaaattataaaatctacagattatttttttatacgttattatgttacacgctctttgaggaaatagatcctaatcattggagtattgtattattattctcaacttttggtatagtgggaagggctaaaaaatgaaagaaaaagtaacagtcattatacctatatacaactcagaagcataccttaaagaatgtgtgcaatccgtactacaacagactcatccattgatagaagttatactaattgatgatggatccactgataatagtggagaaatttgtgataatttatctcaggaagataatcgcatacttgtatttcataaaaaaaatggaggggtctcttcggcaaggaacctaggtctagataaatccacaggagaattcataacatttgtggatagtgatgattttgtagcaccgaatatgattgaaataatgttaaaaaatttaatcactgagaatgctgatatagcagaagtagattttgatatttcgaatgagagagattatagaaagaagaaaagacgaaacttttataaagtttttaagaataataactctttgaaagaatttttatcaggtaatagagtggaaaatattgtttgtacaaaattatataaaaaaagtataattggtaacttgaggtttgatgagaacttaaaaattggtgaggatttactttttaattgcaaactcttatgtcaagagcaccgtatagtcgtagatacgacttcttccttatatacttatcgaattgtaaaaacttctgtaatgaatcagaaattcaacgaaaactcattagattttataacaatttttaatgaaataagtagtttggttcctgccagattagctaattatgttgaagcgaaatttttaagagaaaagataaagtgtctccgaaaaatgtttgaattaggtagtaatattgacaataaaatcaaagtacaacgagagatttttttcaaagacattaaatcatacccgttctataaagcggtcaaatacttatcattaaagggattattaagcttttatttaatgaaatgttcacctaaactatatgttatggcatatagaagatttcaaaaacagtagctggagaaatttggaaagagaatttataacttcatgataaagaaaattgaaaaggatttaataagtgtaattgtacctatttataatgttgaagattatttagttgaatgtatagaaagccttattgttcaaacatatcgaaatattgaaatattattgattaatgatggttcgacggataattgtgcaacaattgccaaagaattttctgaaagagattgtagagttatctatatagaaaagtcgaatggtgggttgtcagaagctagaaactatggaatttatcattcaaagggaaaatacttaacttttgttgattcagatgataaagtttcctctgattacatagcgaatttgtataatgctattcaaaaacatgattcgtctatagctatcggtggctatttagaattttatgaaagacataatagcataagaaattatgaatatttagacaaagtgatatcagttgaagaagcactactaaacatgtatgacattaaaacttatggttcaatttttattactgcatggggaaaattattccataaatctatattcaatgatttagaatttgcattaaataagtatcatgaggatgagttctttaactataaagcatacttaaaagctaattctataacatacatagacaagcctctctatcattatcgtatacgagtaggtagtatcatgaataatagtgataatgttataattgctagaaagaaacttgatgttttatcagcattagacgagcgaataaaacttataacaagtttacgtaagtattccgtttttttacaaaaaacagaaatattttatgtcaatcaatattttaggactaaaaaatttttaaaacaacaatctgtaatgtttaaagaagataactatatcgatgcttatagaatgtatggacggttacttagaaaagtgaagttagttgataaattaaaacttataaaaaataggtttttctagaaatggctgtttaatagttgtaatgtgagtgaccacgaattgttggataactatcaaaaagactaatttaggggaaaaataaaatgactaattttgtttgtcatactttataccatctactgattactataataaagttaaaagataaagaaaatactagaatatttatttgtgacactatcacggattatgaaacttgggtaaagatattaaatgatcagggaataagaactgaatcatttaaagagtttgcttatcgggagcagttacaaaataaaaatattgaagaagtgatggagcttgtagattcagacttaaatcactactttgagagagtagatacacaagtctatctatttaatgatgatactttaataggtcgctatatggtgtatttaggtaaaaattatcatctaattgaagatggttataactgttttcaagccaagttattcttgggtggttctgtcgtaaaacgagtaattaaaacttacttatttaaaaagtatgttccgtatggtttttcaaaatattgtctctcaattgaggttaattctttagtggggttacctcatgacataaggagtaagaaatataaagaactaccgagaaaaaaattatttgatagtcttaacaaagaacaaaaatcactgattttcaaaatatttaaaacaaaaccattaactataactccaaagtcagtattattgttgacacagccacttgcacaagataaatgttataaaacacctacagagaggtttcaaagtattcaagagcaatacgattattttgacgatattgtccaggaatatagaacgttagggtacaatgtttatttaaaagttcatcctagagatgtagtagattattccaaattgccggtagagctattaccatcaaatgttcctatggaaattatagagttgatgtcaacaggtcggttcgaatgtgggataacacattcgtccactgcgctggattttttaacttgtgttgataaaaaaataactttagtagatctgaaggatattaaatgaatactaagaaattacttcaatctggttttatttatacactcgggaatttattggtgcaaggattagcctttatcacacttcccatctatactcgggttatctcaacagaagtttatggccaatatagtttatatgtcgcttggatgaatattattatgctttttattggccttcagacgagcggttctttaagttcagcccgggtcaaatacggagaagaatttaaaagctattcagggagtgccttttctgtaggtaatatatggtttcttattatacttttgatagcttttctatttagaagttttcttgcaccattagttggtttttctgaatctatttttttattaatggtgtgtcaaagttacgctagctatgtggtgactttctttggtcagtattttatacaacaacagaggagtttggctaatttaatattatccttagccaatgcagtttcatctgttgcactatctctatttttaatttttcattggtccgatgactttttatctagggtttttggagcttttgttcctactataataactggaatagttgcctttgcttatatttattatcatagcaaatctttttacaatcctaagtattttcggttcattgtcactgtgtctgttcccttgattttccatttgttaggacaccagttgttggggcaattagatagaattatgctagctcgtttatacaatactaaagaagttgcaatgtatagtttcggttattcgcttggaatgattattcagattgttttgaatagtattaatatggcttggattccatggttttttgatgctagaaaagaaaaattactgcaactttcaacttatattagccgttatctctacttaggagttttcttaacattaggttatttgactgtttttcctgagttagctcaaataatgggaggagacaagtatagtagtagtgttcaatttatttctttaattattgtcagctactttttagtttttctctatacatttcctgtaaatatccaattcttctatgctaatacgacatggattcctattgggacattattagctgctggtgtaaattggttactaaaccttgtattaattcctcattatgcagcctatggcgctgctatggctacaataatatcttatttagccttgttgatttttcatcatattgtttcgaaagttaaataccattattcagatgtctcagttaggcagtacatcattttaagtggtatagtatttagttatgctatgttaatgaacatgttcctagataatatcgttattagatggagtttaggaataattattcttatagtatatagcattgtttttcaaaaagtcattttagacttattgagtaaaaaaagaaggagaagataatggtttatattattgcagagattggttgcaatcataatggagatattaatcttgcgaaaaaaatggtagatgttgccgtgtcttgtggtgttgatgctgttaaatttcagacttttaaagctgagaaacttatttctaaatttgctcccaaagctgaatatcaaaaagcaactacaggaacagcagacagtcaacttgagatgacgaaacgtttagagttaagctttgaagaatacttagaaatgcgtgattatgcaatttcaaaaggtgtggagaccttttcaacaccttttgatgaagagtcattagagttcttaatttctacagatatgccaatttacaaaattccatcaggagaaatcactaatttaccttacttagaaaagattggcaagcaacaaaagaaagttattctttcgacgggtatggcggtaatggaagagatccatcaagcggtgaatattttacgtcagaatggtacaaccgacatttctattttacattgtacaacagagtacccaacaccttacccctctctaaatttaaacgttattcatactttgaaagatgaatttaaagatttaacgataggttattcggatcattcaattggatcagaagtacctatcgcagcagcagcaatgggtgcagaagttattgaaaaacactttactttagatactaatatggaaggtccggatcataaagccagtgcaacacctgatattttagctgctttagttaaaggggttcgcattgttgaacaagccttaggtagatttgaaaaaatcccagatccagtagaagagaaaaataagattgttgctcgtaaatcagtcgttgctttaaaaccaattaaaaaaggcgatatttattcaatagaaaatattacggtgaagcgcccaggtaatggtatttctcctatgaactggtatgacatcttgggacaagaagcgcaagatgatttcgaagaggatgaagttattcgtgattcacgctttgaaaatcaattgcccgagttataataacacctaattataatcggcaacagatgtattacacggctaagattatgtaattactatatatagaagggatacgatgaaaaaaatttgtttagtaaccggatcgcgtgctgaatacggaataatgaagccattgattcaaagattatcaaaagataaagaagtcaacttacaaattattgcaacagcaatgcatctggaagaaaagtacggctatacttatcgtcaaattgaagaagacggttttgatattgcttataaagttcccttacatctttatgatactgacagaagaactgtatctactgcaatggcgcatttacaactaggattgaccaaaatttttgacaaggaagactatgatctagtcatcattttaggggatcgttacgaaatgttaccagttgtgaatgtagcgttgatttataatgtcccagtatgccaccttcatggaggggagacctcattaggcaattttgatgagtatattcgccatgcaattactaagatgagtcacctacacttagtctctacagaggactttcgtcaacgtgtgattcagatgggagaacaacctcaatttgtaattaacacaggagctctcggagtggaaaatgctctatcaatcccttctctaaccaaagaagcaatagaaaagcaattaggtattgtactagaggaatcctattttgttgttctctatcatcctgttacttttgaacaaggaaaaagtgctggagaacagatgaaagcggtactatcagccctttctaaatttggtgtccagtgtctatttataggatccaattcagatactggttctgatgatattgcaaaggctatcaatacttatttgataaatcatgaaaatagttattgctttgcttctttatcaacccaactttatcattccttaattcgtcattcactaggactgattggtaattcgtcttctggtttaatagaagttccttctttgatgaaacctactcttaatattggtgatcgccaaaaaggtaggctacatggagaaagtgtagtaagtgtaccagtcgaaaccccctctgtattggagggattatcaaaattgaatgaagtgaccaactttgacaatccctactacaaagagaatgcttcatctattgcatatgaagcaataaagctttatttgaaagatgaaccttcaatttcccaaccattttatgatttaaaggagaataatctaaaatgaaaaaaaagttggcatttttaggcgcaggaagtcatgctgatgcgattgctccggttattgatcctcttgtgtatgatttcgtaggtttttttgatgataaagatattacggagcatgatggttatcctgttcttggaaaactttatgatgtgctaccttaccttgaagatggctcaatagatgcagtatttattacaataggtgataatgctaaaaggaaagaactatttgaatatgtagcaaaggattattatgactttattattaacatcattagtcccaatgctttagtattgacaccagatagtatttgtgggcgtggtatctttattggttttggggcttttataggttctaaagtgaagctgtttgataacaacgttgttaatacaggagcgctcattgaacatcatactgttgtagaatcacactgtaatatagcacctaatgctaccataaatggtctttgttatattagagaagaagtttatgtaggtagtgccagtgttattattcaaaccttggatatttcatcgtgtacgacaattggcgcaggagctgttgttgtaaaagatattatagaacctggaacctatgtaggggttccagccaaaaaaataaaataaaggatatgttatgaagccaatttgtattattcctgcgcgatcagggtcaaaaggattaccagataagaatatgttattcctagcaggtaaacccatgattttccatactatagatgctgcaattgaatctggaatgtttgataagaaagatatttttgttagtacagattcagaattgtacagagagatttgtttagaacgcggtatttcagtggtgatgagaaaaccggaactttcaactgatcaggcaacttcgtatgatatgttaaaagattttttatctgactatgaagataatcaggagtttgtgttacttcaagtaacctctccactaagaaaatcatggcatataaaggaagcaatggagtattattcttcacatgatgttgacaatgttgtaagtttttctgaagttgagaaacaccctggtctgtttacgacattgtctgataaaggctatgctatagatatggtgggagcagataaaggttatcgtcgccaagatttacaacctttatactatccgaacggcgctatttttatttctaataaagaaacttacttaagggaaaaaagctttttcacctctaggacatatgcttatcaaatggcaaaggaattttcattagatgttgatacgagagatgattttatccacgtcatcggtcacctctttttcgattatgccattagggaaaaagagaataaagttttttataaagaaggctatagtcgtttgttcaatagagaagcttcaaagataattttaggtgattcaaaaacgatatctatctcactagaaaattaccataattattcccaaggtggtgtaacattagcaacgatgttggaaaacttacctaactttttgacagctaatgtaacagaggcttttgtttctataggggtaaatgatctcattacaggttatagtgtggaagaaatattcagcaatttccaaaaactctactcattattagctgagaataaaataaagatgagatttacaactattgcttacaccctttttagagaaactgtcaataatgcagatattgagaaaatcaatcaatggctaacagaattttgttatcaaaatcagattccactgttagatattaatagatttttatcaaaggatggtaatctaaattatcatttaactagtgatggattgcattttgactcaagaggctaatgatttgtaacaaagtcaatatcaattatttgtagacgaagttaaaaccttataatatttattttataaaattattcatcttattttggcgatttcaatagtgatatggtatatttaaagtaagctacgtatagttttaccagtcagaaatagtaaggatggttgagtatgagagaaactgaaacacacgatcaccaagcgctaattcaaaaattgttagtcagtattcattatttaaccttgtttcgtgatgaaattatattagtagaaaaaaccccatctttactggggaaacatttttctattgctattgtgcagaatgaactaggtgagatactttctaaaatagaagctttgagtaagcaaaaaaaactgattcgttctatttattggtatgatgaatcgtcatttaaagtcatgaataaggctctggctattgtagaagaatggattaagggcttagataatcttttagaattctgtcaatcacagacggtttttcaagcaattttaggtgatgaacgtgcacatgtatttggaatccttattgatgtttatacttctttaaacattataaatacttctttgaaagaagaaaattctaga

SEQ ID NO: 80 - protein, 381 aa, Streptococcus agalactiae
MRKYLDLDYSLFYALWVLILVPNQWYQFLIITIIVLLLLWKSEFRISISNSSILFLLWLFIYLFAILIRGTQEDITFQRFIAELLKLISTGYALFFYNYYRKADFNSSVVRNVVKVNYFVLFLITVLYLFFPMLKPTLFGRELFSIEWFPHMRIRLAAYFEYATLIGQFILFSYPILFLKPQKHMENILISLLLTICSYFSGARILLVCMLVLLASLLLDYILFKTNLKLTKKNTFILGMTFLFITACFSYNIWSIIEKIIMYRNQSTITRMIVYQESIIEVLKGNILFGQGIRIPSSEGIFLGSHSTYISVFYRTSLLGIVLYFSAFILLYKEAISKNYKIYRLFFYTLLCYTLFEEIDPNHWSIVLLFSTFGIVGRAKK

SEQ ID NO: 81 - DNA, 3042 bp, Staphylococcus aureus
  CDS (149)..(2296)
actattgtatattgcaaagctaattaactataacaaaaagatagttaatgctttgtttattctagttaatatatagttaatgtcttttaatattttgtttctttaatgtgtagattgggcaattacattttggaggaattaaaaaattatgaaaaagcaaataatttcgctaggcgcattagcagttgcatctagcttatttacatgggataacaaagcagatgcgatagtaacaaaggattatagcaaagagtcaagagtgaatgagaacagtaaatatgggacattaatttcagactggtatttaaaagggagattaactagtctagaatctcaatttatcaatgcattggatattttagagacatatcattatggcgaaaaagagtataaagatgcaaaagataaattgatgacaagaattttaggggaagaccaataccttttagaaagaaaaaaagtgcagtatgaggaatacaaaaaattataccaaaaatataaagaagagaatccaacctctaaaggcttaaaactgaaaacattcgatcaatatacaatagaagatttaactatgagggaatataatgagttaacagaatcattaaaaagtgctgtaaaagactttgagaaagatgttgaaaaaatagaaaatcaacatcatgatttgaaaccatttactgatgaaatggaagagaaggctacttctagagttgatgatttagcaaataaagcatatagtgtttattttgcatttgttagggatacacaacataaaactgaggcattagagttaaaagcgaaagtagatttagttttaggtgatgaggataaaccgcatcgtatttctaatgaaagaattgaaaaagaaatgataaaagatttagaatctattattgaagatttctttatagaaactggtttaaataagcctggtaatattacgagttatgatagtagtaaacatcactataaaaatcacagtgaaggttttgaggctctagtcaaagaaacaagagaagcagtagcaaacgctgacgaatcttggaaaactaaaactgtaaaaaaatacggtgaatctgaaacaaaatctcctgttgtaaaagaagagaacaaagttgaagaccctcaatcacctaaatttgataaccaacaagaggttaaaactacggctggtaaagctgaagaaacaacacaaccagttgcacaaccattagttaaaattccacagggcacaattacaggtgaaattgtgaaaggtccggaatatccaacgatggaaaataaaacgttacaaggtgaaatcgttcaaggtccagatttcccaacaatggaacaaagcggtccatctttaagcgacaattatactcaaccgacgacaccgaaccctattttagaaggtcttgaaggtagctcatctaaacttgaaataaaaccacaaggtactgaatcaacgttgaaaggtattcaaggagaatcaagtgatattgaagttaaacctcaagcaactgaaacaacagaagcttctcaatatggtccgagaccgcaatttaacaaaacacctaagtatgtgaaatatagagatgctggtacaggtattcgtgaatacaacgatggaacatttggatatgaagcgagaccaagattcaacaagccatcagaaacaaacgcatacaacgtaacgacaaatcaagatggcacagtatcatacggcgcccgcccaacacaaaacaaggcatcagaaacaaacgcatataacgtaacaacacatgcaaacggccaagtatcatacggagctcgcccaacacaaaagaagccaagcgaaacaaatgcatataacgtaacaacacatgcaaacggccaagtatcatatggcgcccgcccgacatacaacaagccaagcgaaacaaatgcatataacgtaacaacacacggaaatggccaagtatcatatggagctcgtccgacatacaagaaaccaagtaaaacaaatgcatataacgtaacaacacatgcaaacggccaagtgtcatacggagctcgcccaacacaaaacaagccaagcgaaacaaacgcatataacgtaacaacacatgcaaatggccaagtatcatacggagctcgcccaacacaaaacaagccaagcgaaacaaacgcatataacgtaacaacacacggaaacggtcaagtgtcatacggcgctcgtccgacatacaacaagccaagtaaaacaaatgcatacaatgtaacaacacatgcagatggtactgcgacatatggtcctagagtaacaaaataagtttataactctatccatagacatacagtcaatacaatacaaaacattacgtatctttacaacagtaatcatgcattctatgatgcttctaactgaattaaagcatcgaacaatcgaaagcatatttctaaattatttattcattatagtcttaaacataacatgacctaatatattactaacctattaaaataaaccacgcacatctatgtgatatacgacaatcacagcaataataattgctttagaaagtcgtaccgaactggaacttacaagtctagttcgaacacactgatgtgagtggttttctttattttaaacatgaacaatcagataagttactagcattagcaaatattattaaatcaaagggcttcgattcataaaatttaaaacaatgattaaaattagacgtgtaaatgttaaattctaaaacggaaatacccgctatcctattaaaccactttttggttcaatcactatatttcacacagcttcaataataaaacgaaactgcttcaatccgcttcaacttcaacctacctcattcagtaaccaaacgaatccgcttcatccaaaatcaaccattctaacgcacatactcaaatatagcagctgcacccataccgacaccaatacacatcgtaaccatgccgtaacggctatcgggacgtctacccatttcattaagtaaacgcgcggttaacattgctcctgtagcacctaatggatgacctaaagcaata

SEQ ID NO: 82 - protein, 715 aa, Staphylococcus aureus
MKKQIISLGALAVASSLFTWDNKADAIVTKDYSKESRVNENSKYGTLISDWYLKGRLTSLESQFINALDILETYHYGEKEYKDAKDKLMTRILGEDQYLLERKKVQYEEYKKLYQKYKEENPTSKGLKLKTFDQYTIEDLTMREYNELTESLKSAVKDFEKDVEKIENQHHDLKPFTDEMEEKATSRVDDLANKAYSVYFAFVRDTQHKTEALELKAKVDLVLGDEDKPHRISNERIEKEMIKDLESIIEDFFIETGLNKPGNITSYDSSKHHYKNHSEGFEALVKETREAVANADESWKTKTVKKYGESETKSPVVKEENKVEDPQSPKFDNQQEVKTTAGKAEETTQPVAQPLVKIPQGTITGEIVKGPEYPTMENKTLQGEIVQGPDFPTMEQSGPSLSDNYTQPTTPNPILEGLEGSSSKLEIKPQGTESTLKGIQGESSDIEVKPQATETTEASQYGPRPQFNKTPKYVKYRDAGTGIREYNDGTFGYEARPRFNKPSETNAYNVTTNQDGTVSYGARPTQNKASETNAYNVTTHANGQVSYGARPTQKKPSETNAYNVTTHANGQVSYGARPTYNKPSETNAYNVTTHGNGQVSYGARPTYKKPSKTNAYNVTTHANGQVSYGARPTQNKPSETNAYNVTTHANGQVSYGARPTQNKPSETNAYNVTTHGNGQVSYGARPTYNKPSKTNAYNVTTHADGTATYGPRVTK

SEQ ID NO: 83 - DNA, 2252 bp, Staphylococcus aureus
  CDS (698)..(2224)
gaattcacaattctagctattatcacttctcaaaataaaaacatcgttcttcttaaagatttaattgaaacaatccaccataaataccctcaaactgttagagctctcaataatttaaaaaagcaaggctatctaataaaagaacggctcaactgaagatgaaagaaaaattttaattcatatgaatgacgcgcagcaagaccatgctgaacaattattagctcaagtgaatcaattattggcagataaaaatcatttacatcttgtttttgaataatatctctattacgcaagtgtgctgtattctaaagtgccattgtgttttctattttttaataaaacctcagcacattatgaacaactttctattttctatatctcttaaaaccatttccgaaattaaacctcagcacattcaaaattccattttattcttaaaaatattttttaactcatatgtaataaaccgctttcattataaaaaatatctatatattttatctgtttttattaatcggaatagcgtgattttgcggttttaagccttttacttcctgaataaatctttggacaaaatttttattttataagttgtaaaacttacctttaaatttaattataaatatagattttagtattgcaatacataattcgttatattatgatgactttacaaatacatacagggggtattaatttgaaaaagaaaaacatttattcaattcgtaaactaggtgtaggtattgcatctgtaactttaggtacattacttatatctggtggcgtaacacctgctgcaaatgctgcgcaacacgatgaagctcaacaaaatgctttttatcaagtgttaaatatgcctaacttaaacgctgatcaacgtaatggttttatccaaagccttaaagatgatccaagccaaagtgctaacgttttaggtgaagctcaaaaacttaatgactctcaagctccaaaagctgatgcgcaacaaaataagttcaacaaagatcaacaaagcgccttctatgaaatcttgaacatgcctaacttaaacgaagagcaacgcaatggtttcattcaaagtcttaaagacgatccaagccaaagcactaacgttttaggtgaagctaaaaaattaaacgaatctcaagcaccgaaagctgacaacaatttcaacaaagaacaacaaaatgctttctatgaaatcttgaacatgcctaacttgaacgaagaacaacgcaatggtttcatccaaagcttaaaagatgacccaagtcaaagtgctaaccttttagcagaagctaaaaagttaaatgaatctcaagcaccgaaagctgataacaaattcaacaaagaacaacaaaatgctttctatgaaatcttacatttacctaacttaaatgaagaacaacgcaatggtttcatccaaagcttaaaagatgacccaagccaaagcgctaaccttttagcagaagctaaaaagctaaatgatgcacaagcaccaaaagctgacaacaaattcaacaaagaacaacaaaatgctttctatgaaattttacatttacctaacttaactgaagaacaacgtaacggcttcatccaaagccttaaagacgatccttcagtgagcaaagaaattttagcagaagctaaaaagctaaacgatgctcaagcaccaaaagaggaagacaacaacaagcctggtaaagaagacggcaacaaacctggtaaagaagacggcaacaaacctggtaaagaagacaacaaaaaacctggcaaagaagacggcaacaaacctggtaaagaagacaacaaaaaacctggcaaagaagatggcaacaaacctggtaaagaagacggcaacaagcctggtaaagaagatggcaacaagcctggtaaagaagatggcaacaagcctggtaaagaagacggcaacggagtacatgtcgttaaacctggtgatacagtaaatgacattgcaaaagcaaacggcactactgctgacaaaattgctgcagataacaaattagctgataaaaacatgatcaaacctggtcaagaacttgttgttgataagaagcaaccagcaaaccatgcagatgctaacaaagctcaagcattaccagaaactggtgaagaaaatccattcatcggtacaactgtatttggtggattatcattagcgttaggtgcagcgttattagctggacgtcgtcgcgaactataaaaacaaacaatacacaacgatagatatc

SEQ ID NO: 84 - protein, 508 aa, Staphylococcus aureus
LKKKNIYSIRKLGVGIASVTLGTLLISGGVTPAANAAQHDEAQQNAFYQVLNMPNLNADQRNGFIQSLKDDPSQSANVLGEAQKLNDSQAPKADAQQNKFNKDQQSAFYEILNMPNLNEEQRNGFIQSLKDDPSQSTNVLGEAKKLNESQAPKADNNFNKEQQNAFYEILNMPNLNEEQRNGFIQSLKDDPSQSANLLAEAKKLNESQAPKADNKFNKEQQNAFYEILHLPNLNEEQRNGFIQSLKDDPSQSANLLAEAKKLNDAQAPKADNKFNKEQQNAFYEILHLPNLTEEQRNGFIQSLKDDPSVSKEILAEAKKLNDAQAPKEEDNNKPGKEDGNKPGKEDGNKPGKEDNKKPGKEDGNKPGKEDNKKPGKEDGNKPGKEDGNKPGKEDGNKPGKEDGNKPGKEDGNGVHVVKPGDTVNDIAKANGTTADKIAADNKLADKNMIKPGQELVVDKKQPANHADANKAQALPETGEENPFIGTTVFGGLSLALGAALLAGRRREL

SEQ ID NO: 85 - DNA, 324 bp, Staphylococcus aureus
  CDS (1)..(306)
  CDS (310)..(315)
atgcggggttctcatcatcatcatcatcatggtatggctagcatgactggtggacagcaaatgggtcgggatctgtacgacgatgacgataaggatccgagctcgagaggatccaaagctgatgcgcaacaaaataacttcaacaaagatcaacaaagcgccttctatgaaatcttgaacatgcctaacttaaacgaagcgcaacgcaacggcttcattcaaagtcttaaagacgacccaagccaaagcactaacgttttaggtgaagctaaaaaattaaacgaatctcaagcagggaaactagtttagaaagcttgatccggc

SEQ ID NO: 86 - protein, 104 aa, Staphylococcus aureus
MRGSHHHHHHGMASMTGGQQMGRDLYDDDDKDPSSRGSKADAQQNNFNKDQQSAFYEILNMPNLNEAQRNGFIQSLKDDPSQSTNVLGEAKKLNESQAGKLVKA

SEQ ID NO: 87 - protein, 60 aa, Staphylococcus aureus
TADNKFNKEQQNAFYEILHLPNLNEEQRNGFIQSLKDDPSQSANLLAEAKKLNDAQAPKA

SEQ ID NO: 88 - DNA, 2593 bp, Homo sapiens
  CDS (56)..(508)
agttgtctttggtagttttttgcactaacttcaggaaccagctcatgatctcaggatgtatggaaaaataatctttgtattactattgtcagcaattgtgagcatatcagcatcaagtaccactggtgtggcaatgcacacttcaacctcttcttcagtcacaaagagttacatctcatcacagacaaatgatacgcacaaacgggacacatatgcagccactcctagagctcatgaagtttcagaaatttctgttagaactgtttaccctccagaagaggaaaccggagaaagggtacaacttgcccatcatttctctgaaccagagataacactcattatttttggggtgatggctggtgttattggaacgatcctcttaatttcttacggtattcgccgactgataaagaaaagcccatctgatgtaaaacctctcccctcacctgacacagacgtgcctttaagttctgttgaaatagaaaatccagagacaagtgatcaatgagaatctgttcaccaaaccaaatgtggaaagaacacaaagaagacataagacttcagtcaagtgaaaaattaacatgtggactggacactccaataaattatatacctgcctaagttgtacaatttcagaatgcaattttcattataatgagttccagtgactcaatgatggggaaaaaaatctctgctcattaatatttcaagataaagaacaaatgtttccttgaatgcttgcttttgtgtgttagcataatttttagaattgtttgagaattctgatccaaaactttagttgaattcatctacgtttgtttaatattaacttaacctattctattgtattataatgatgattctgtcaaatgaaaggcttgaaatacctagatgaagtttagattttcttcctattgtaaacttttgagtctggtttcattgttttaaataaattaaggggacactaaagtcctatcattcattccttcattctgaacaggcaagatataatattacatgaatgattactatattttgttcacactaataaagcttatgctcagaaatgccatacacacacacaaacacacacatttatcatttaatgcataaatcaacacaaaaggttttcccattaatatgaaatattacatatatataagtgccatatttaaaataatttgtctaacagtagaactatgtcggagcactcactgaagcttcgatttcccactgaaagagttatttgttgtaagtagagttatcccggagaaggaaaaagaacttacgacctttctttataacagaaagctcaactctaaattcaacaagatgtgcaaaccggacatgcaggtgaatattttaataggttactataaggttctcaattaaattctttaatctgtccagtcccagtttctcttattaataaaactttggaaattgctttaaaccatttaaaggaaatttctagatatagaaactaaaggactgtgactatacagtgtcactcatttgtagtaaaacttaaaaagcaaaaacaaaaaacaaaaaagaccttcctgtgatactttatttccgaactaataaaaatctatatgactttttattattgtgtgataaccaagtaaatgttttctattttcgatattttcaggcatggtaacagaaatttaccttttaataaattaaaaaatctaaattttaacctacttgtatgttcggagagtgtttttgtactatattgactacttaaaatagagaatgagactaagaagggaacatttctgttgatacatgttttttaaaagtaatttttaagagcattattaggttaatttaatccaattaatgacccaaatgccaaggtaattttaaatttacatttttaataaaagcaacatgttgaaacaagagagggtgagattaacctttttgctaaagtaatttacaagtcaaagacaggaagagatcagagtgaatgtgccttcttaaccagagctacagaatttagtgaataattaaagtacaaactgctttgacctccttgaacttttccaagcaatttctctgtacttctatatatgaatgtcttagccaattttctgctactataacagaatacgacagactgggtaatttaaaaagaaaagaaatttattttcttcctagttctggaggctgggaaggcgaagggcatggcactgacatctgccttgtaactgatgagaaccttcttactgcatgataacaaagcagcaaggcaagcaaaagcgtaagatgaagagagaggaaatgaagccaaacacatcctttcatcagaagcccattccctctataaggcgttactacatttatgagaatggagtcctcatgacctaatcgtgaccttaaaggcccctcccaacactgttacaatggcaattaaatttcaacaaaggttccagaggtgacattcgaatcagcaatgaaattttcatagttaaatttggtattcgtgggggaagaaatgaccatttcccttgtatttttataattaaatcagcaaaatattgtaataaagaaatctttcctgtgaagataccatgacccc

SEQ ID NO: 89 - protein, 150 aa, Homo sapiens
MYGKIIFVLLLSAIVSISASSTTGVAMHTSTSSSVTKSYISSQTNDTHKRDTYAATPRAHEVSEISVRTVYPPEEETGERVQLAHHFSEPEITLIIFGVMAGVIGTILLISYGIRRLIKKSPSDVKPLPSPDTDVPLSSVEIENPETSDQ

SEQ ID NO: 90 - DNA, 5185 bp, Homo sapiens
  CDS (104)..(4474)
gggaacttggattaggtggagaggcagttggggggcctcgttgttttgcgtcttagttccgccctcctgtccatcaggagaaggaaaggataaaccctgggccatgaggctacccctgctcctggtttttgcctctgtcattccgggtgctgttctcctactggacaccaggcaatttttaatctataatgaagatcacaagcgctgcgtggatgcagtgagtcccagtgccgtccaaaccgcagcttgcaaccaggatgccgaatcacagaaattccgatgggtgtccgaatctcagattatgagtgttgcatttaaattatgcctgggagtgccatcaaaaacagactgggttgctatcactctctatgcctgtgactcaaaaagtgaatttcagaaatgggagtgcaaaaatgacacacttttggggatcaaaggagaagatttattttttaactacggcaacagacaagaaaagaatattatgctctacaagggatcgggtttatggagcaggtggaagatctatggaaccacagacaatctgtgctccagaggttatgaagccatgtatacgctactaggcaatgccaatggagcaacctgtgcattcccgttcaagtttgaaaacaagtggtacgcagattgcacgagtgctgggcggtcggatggatggctctggtgcggaaccactactgactatgacacagacaagctatttggatattgtccattgaaatttgagggcagtgaaagcttatggaataaagacccgctgaccagcgtttcctaccagataaactccaaatccgctttaacgtggcaccaagcgaggaaaagctgccaacaacagaacgctgagctcctgagcatcacagagatacatgagcaaacatacctgacaggattaaccagttccttgacctcaggactctggattggacttaacagtctgagcttcaacagcggttggcagtggagtgaccgcagtcctttccgatatttgaactggttaccaggaagtccatcagctgaacctggaaaaagctgtgtgtcactaaatcctggaaaaaatgctaaatgggaaaatctggaatgtgttcagaaactgggctatatttgcaaaaagggcaacaccactttaaattcttttgttattccctcagaaagtgatgtgcctactcactgtcctagtcagtggtggccgtatgccggtcactgttacaagattcacagagatgagaaaaaaatccagagggatgctctgaccacctgcaggaaggaaggcggtgacctcacaagtatccacaccatcgaggaattggactttattatctcccagctaggatatgagccaaatgacgaattgtggatcggcttaaatgacattaagattcaaatgtactttgagtggagtgatgggacccctgtaacgtttaccaaatggcttcgtggagaaccaagccatgaaaacaacagacaggaggattgtgtggtgatgaaaggcaaggatgggtactgggcagatcggggctgtgagtggcctcttggctacatctgcaagatgaaatcacgaagccaaggtccagaaatagtggaagtcgaaaaaggctgcaggaaaggctggaaaaaacatcacttttactgctatatgattggacatacgctttcaacatttgcagaagcaaaccaaacctgtaataatgagaatgcttatttaacaactattgaagacagatatgaacaagccttcctgactagtttcgttggcttaaggcctgaaaaatatttctggacaggactttcagatatacaaaccaaagggacttttcagtggaccatcgaggaagaggttcggttcacccactggaattcagatatgccagggcgaaagccagggtgtgttgccatgagaaccgggattgcagggggcttatgggatgttttgaaatgtgatgaaaaggcaaaatttgtgtgcaagcactgggcagaaggagtaacccacccaccgaagcccacgacgactcccgaacccaaatgtccggaggattggggcgccagcagtagaacaagcttgtgtttcaagctgtatgcaaaaggaaaacatgagaagaaaacgtggtttgaatctcgagatttttgtcgagctctgggtggagacttagctagcatcaataacaaagaggaacagcaaacaatatggcgattaataacagctagtggaagctaccacaaactgttttggttgggattgacatatggaagcccttcagaaggttttacttggagtgatggttctcctgtttcatatgaaaactgggcttatggagaacctaataattatcaaaatgttgaatactgtggtgagctgaaaggtgaccctactatgtcttggaatgatattaattgtgaacaccttaacaactggatttgccagatacaaaaaggacaaacaccaaaacctgagccaacaccagctcctcaagacaatccaccagttactgaagatgggtgggttatttacaaagactaccagtattatttcagcaaagagaaggaaaccatggacaatgcgcgagcgttttgcaagaggaattttggtgatcttgtttctattcaaagtgaaagtgaaaagaagtttctatggaaatatgtaaacagaaatgatgcacagtctgcatattttattggtttattgatcagcttggataaaaagtttgcttggatggatggaagcaaagtggattacgtgtcttgggccacaggtgaacccaattttgcaaatgaagatgaaaactgtgtgaccatgtattcaaattcagggttttggaatgacattaactgtggctatccaaacgccttcatttgccagcgacataacagtagtatcaatgctaccacagttatgcctaccatgccctcggtcccatcagggtgcaaggaaggttggaatttctacagcaacaagtgtttcaaaatctttggatttatggaagaagaaagaaaaaattggcaagaggcacgaaaagcttgtataggctttggagggaatctggtctccatacaaaatgaaaaagagcaagcatttcttacctatcacatgaaggactccactttcagtgcctggactgggctgaatgatgtcaattcagaacacacgttcctttggacggatggacgaggagtccattacacaaactgggggaaaggttaccctggtggaagaagaagcagtctttcttatgaagatgctgactgtgttgttattattggaggtgcatcaaatgaagcaggaaaatggatggatgatacctgcgacagtaaacgaggctacatatgccagacacgatccgacccttccttgactaatcctccagcaacgattcaaacagatggctttgttaaatatggcaaaagcagctattcactcatgagacaaaaatttcaatggcatgaagcggagacatactgcaagcttcacaattcccttatagccagcattctggatccctacagtaatgcatttgcgtggctgcagatggaaacatctaatgaacgtgtgtggatcgccctgaacagtaacttgactgataatcaatacacttggactgataagtggagggtgaggtacactaactgggctgctgatgagcccaaattgaaatcagcatgtgtttatctggatcttgatggctactggaagacagcacattgcaatgaaagtttttactttctctgtaaaagatcagatgaaatccctgctactgaacccccacaactgcctggcagatgcccggagtcagatcacacagcatggattcctttccatggtcactgttactatattgagtcctcatatacaagaaactggggccaagcttctctggaatgtcttcgaatgggttcctctctggtttccattgaaagtgctgcagaatccagttttctgtcatatcgggttgagccacttaaaagtaaaaccaatttttggataggattgttcagaaatgttgaagggacgtggctgtggataaataacagtccggtctcctttgtcaactggaacacaggagatccctctggtgaacggaatgattgtgtagctttacatgcgtcttctgggttttggagtaatattcactgttcttcctacaaaggatatatttgtaaaagaccaaaaattattgatgctaaacctactcatgaattacttacaacaaaagctgacacaaggaagatggacccttctaaaccgtcttccaacgtggccggagtagtcatcattgtgatcctcctgattttaacgggtgctggccttgccgcctatttcttttataagaaaagacgtgtgcacctacctcaagagggcgcctttgaaaacactctgtattttaacagtcagtcaagcccaggaactagtgatatgaaagatctcgtgggcaatattgaacagaatgaacactcggtcatctagtacctcaatgcgattctgagatatttgaatttcataaaattgtaactgaaatttaaaatttttagttcaatgtgattgttttctttaaaatgagtactgaattgtactggtctgtccttttttcctttgcctaattgaagaaataattgcttgttttctagcctggcaagatattttcataaaagagggataacaatgctgattactaccttttaaaatattttagataaatgcacagcaccacagcaccacatctaagcattagtgatgggtagctgatgtcagcttcatgtggattttaagcactctagaaacaatgaagcttcttggcatattttaaggagctcccaaaatgtgttacctattaaattgtaactcagcaagtagaagaccatttgaaaagtcaggtacaaatttcctcaagtggcataaaaatgtagtcagttttctcttttaccagtttttatttccactccaattatttagaactttatttgtacatgtgcagaagaataaggcagctgagaatcttgtttcccccaagagagttttacaggctgagtgttgcaaatgtgttctttgtcctgttatatgtatatcaggaatacaaggatgtgaaataaaactgtaaatttgcataactggatgtacttagataatgtgaaataaacattaaagacaaggtctatttttaataaaaaaaaaaaaaaa

SEQ ID NO: 91 - protein, 1456 aa, Homo sapiens [sequence omitted]

SEQ ID NO: 92 - DNA, 780 bp, Homo sapiens
gtgtatctctcagagtgcaagactgggaatggaaagaattacagagggacgatgtccaaaacaaaaaatggcatcacctgtcaaaaatggagttccacttctccccacagacctagattctcacctgctacacacccctcagagggactggaggagaactactgcaggaatccagacaacgatccgcaggggccctggtgctatactactgatccagaaaagagatatgactactgcgacattcttgagtgtgaagaggaatgtatgcattgcagtggagaaaactatgacggcaaaatttccaagaccatgtctggactggaatgccaggcctgggactctcagagcccacacgctcatggatacattccttccaaatttccaaacaagaacctgaagaagaattactgtcgtaaccccgatagggagctgcggccttggtgtttcaccaccgaccccaacaagcgctgggaactttgtgacatcccccgctgcacaacacctccaccatcttctggtcccacctaccagtgtctgaagggaacaggtgaaaactatcgcgggaatgtggctgttaccgtgtccgggcacacctgtcagcactggagtgcacagacccctcacacacatgaaaggacaccagaaaacttcccctgcaaaaatttggatgaaaactactgccgcaatcctgacggaaaaagggccccatggtgccatacaaccaacagccaagtgcggtgggagtactgtaagataccgtcctgtgactcctccccagta

SEQ ID NO: 93 - DNA, 1449 bp, Homo sapiens
  CDS (1)..(1449)
atggcgtctttctctgctgagaccaattcaactgacctactctcacagccatggaatgagcccccagtaattctctccatggtcattctcagccttacttttttactgggattgccaggcaatgggctggtgctgtgggtggctggcctgaagatgcagcggacagtgaacacaatttggttcctccacctcaccttggcggacctcctctgctgcctctccttgcccttctcgctggctcacttggctctccagggacagtggccctacggcaggttcctatgcaagctcatcccctccatcattgtcctcaacatgtttgccagtgtcttcctgcttactgccattagcctggatcgctgtcttgtggtattcaagccaatctggtgtcagaatcatcgcaatgtagggatggcctgctctatctgtggatgtatctgggtggtggcttttgtgatgtgcattcctgtgttcgtgtaccgggaaatcttcactacagacaaccataatagatgtggctacaaatttggtctctccagctcattagattatccagacttttatggagatccactagaaaacaggtctcttgaaaacattgttcagccgcctggagaaatgaatgataggttagatccttcctctttccaaacaaatgatcatccttggacagtccccactgtcttccaacctcaaacatttcaaagaccttctgcagattcactccctaggggttctgctaggttaacaagtcaaaatctgtattctaatgtatttaaacctgctgatgtggtctcacctaaaatccccagtgggtttcctattgaagatcacgaaaccagcccactggataactctgatgcttttctctctactcatttaaagctgttccctagcgcttctagcaattccttctacgagtctgagctaccacaaggtttccaggattattacaatttaggccaattcacagatgacgatcaagtgccaacacccctcgtggcaataacgatcactaggctagtggtgggtttcctgctgccctctgttatcatgatagcctgttacagcttcattgtcttccgaatgcaaaggggccgcttcgccaagtctcagagcaaaacctttcgagtggccgtggtggtggtggctgtctttcttgtctgctggactccataccacatttttggagtcctgtcattgcttactgacccagaaactcccttggggaaaactctgatgtcctgggatcatgtatgcattgctctagcatctgccaatagttgctttaatcccttcctttatgccctcttggggaaagattttaggaagaaagcaaggcagtccattcagggaattctggaggcagccttcagtgaggagctcacacgttccacccactgtccctcaaacaatgtcatttcagaaagaaatagtacaactgtgtga

SEQ ID NO: 94 - protein, 482 aa, Homo sapiens
MASFSAETNSTDLLSQPWNEPPVILSMVILSLTFLLGLPGNGLVLWVAGLKMQRTVNTIWFLHLTLADLLCCLSLPFSLAHLALQGQWPYGRFLCKLIPSIIVLNMFASVFLLTAISLDRCLVVFKPIWCQNHRNVGMACSICGCIWVVAFVMCIPVFVYREIFTTDNHNRCGYKFGLSSSLDYPDFYGDPLENRSLENIVQPPGEMNDRLDPSSFQTNDHPWTVPTVFQPQTFQRPSADSLPRGSARLTSQNLYSNVFKPADVVSPKIPSGFPIEDHETSPLDNSDAFLSTHLKLFPSASSNSFYESELPQGFQDYYNLGQFTDDDQVPTPLVAITITRLVVGFLLPSVIMIACYSFIVFRMQRGRFAKSQSKTFRVAVVVVAVFLVCWTPYHIFGVLSLLTDPETPLGKTLMSWDHVCIALASANSCFNPFLYALLGKDFRKKARQSIQGILEAAFSEELTRSTHCPSNNVISERNSTTV

SEQ ID NO: 95 - DNA, 852 bp, Homo sapiens
  CDS (59)..(463)
cttgcagctgcccacctcaccctcagctctggcctcttactcaccctctaccacagacatggctcagtcactggctctgagcctccttatcctggttctggcctttggcatccccaggacccaaggcagtgatggaggggctcaggactgttgcctcaagtacagccaaaggaagattcccgccaaggttgtccgcagctaccggaagcaggaaccaagcttaggctgctccatcccagctatcctgttcttgccccgcaagcgctctcaggcagagctatgtgcagacccaaaggagctctgggtgcagcagctgatgcagcatctggacaagacaccatccccacagaaaccagcccagggctgcaggaaggacaggggggcctccaagactggcaagaaaggaaagggctccaaaggctgcaagaggactgagcggtcacagacccctaaagggccatagcccagtgagcagcctggagccctggagaccccaccagcctcaccaacgcttgaagcctgaacccaagatgcaagaaggaggctatgctcaggggccctggagcagccaccccatgctggccttgccacactctttctcctgctttaaccaccccatctgcattcccagctctaccctgcatggctgagctgcccacagcaggccaggtccagagagaccgaggagggagagtctcccagggagcatgagaggaggcagcaggactgtccccttgaaggagaatcatcaggaccctggacctgatacggctccccagtacaccccacctcttccttgtaaatatgatttatacctaactgaataaaaagctgttctgtcttcccacccgc

SEQ ID NO: 96 - protein, 134 aa, Homo sapiens
MAQSLALSLLILVLAFGIPRTQGSDGGAQDCCLKYSQRKIPAKVVRSYRKQEPSLGCSIPAILFLPRKRSQAELCADPKELWVQQLMQHLDKTPSPQKPAQGCRKDRGASKTGKKGKGSKGCKRTERSQTPKGP

SEQ ID NO: 97 - DNA, 6788 bp, Homo sapiens
gctttcctctcctttctccctcccccttgtctgcgccacagcccccttctctccccgccccccgggtgtgtcagatttttcagttaataatatcccccgagcttcaaagcgcaggctgtgacagtcatctgtctggacgcgctgggtggatgcggggggctcctgggaactgtgttggagccgagcaagcgctagccaggcgcaagcgcgcacagactgtagccatccgaggacacccccgcccccccggcccacccggagacacccgcgcagaatcgcctccggatcccctgcagtcggcgggaggtaaggagcagggcttgcaaaccgcccggcgcccagggaagcgacgagcgccggggcaaggcaagccctggacgggattgcgacgtgcgcaccgggcgccctaatatgcccgggggactgtttctgcttccgaaacaaaaccatctctgggttttcccagaaaagccagttccagccccgaaggcatcctggctagaggagacccgccctaatccttttgcagcccttaccggggggagtaatggcttctgcgaaaagaaattccctcggctctagaagatctgtctgtgtttgagctgtcggagagccggtgcgtccccaccccaggctggggttcttctccaaagggtgcccctggaggaagaagagggggggattaggcagggcgaggccgccgcggtcgcaatctgggtcacggctgctccagcttggaggagaggcggctctcccggcgacctcctcgcgcgcggcgcccctgccattcccgggaacaggggctcagcctctccctccctggaagaggacgttgtcgtggtttggaagagcaggggtgggcttagagcttccaattaagctattggcaggagtatccctgcagcgggtgaatgccgaggggcgtttgcccaaatttggggaggggaaggatttgtggatatgggtgtctgttgttggtctctgtctagagaaaggcttttttttatttgcaaagttttctaaatcccctgctatcatttgcactcctgaggttgcatttttacaaagggggtagaaggtactccaaataccattcccggtagctgggtcggagagcctggggcttcccctgagcagccggccccacaccgctgcgagtgcggttgtctgcgtgctcgtgagagctagaattctgcagccaggaacagccccctcccccaggcagtgccttgtgtgaatgaaatggcagtttccaaagttgcggacgcctcgccaccaccccctgcatctgcatgccccctcccaccccctgtcgtagacagcttgtacacaaaaggagggcgggagggagggagcgagaggcacaacttcctccaccttcgggagcagtgggcagagtggggggcttggagggaagattggggaacctggttagagggggcgcccattgcctatcccctcggtctgccccgtttgcccaccctctccggtgtgtctgtcggttgcagtgttggaggtcggcgccggcccccgccttccgcgccccccacgggaaggaagcacccccggtattaaaacgaacggggcggaaagaagccctcagtcgccggccgggaggcgagccgatgccgagctgctccacgtccaccatgccgggcatgatctgcaagaacccagacctcgagtttgactcgctacagccctgcttctacccggacgaagatgacttctacttcggcggccccgactcgacccccccgggggaggacatctggaagaagtttgagctgctgcccacgcccccgctgtcgcccagccgtggcttcgcggagcacagctccgagcccccgagctgggtcacggagatgctgcttgagaacgagctgtggggcagcccggccgaggaggacgcgttcggcctggggggactgggtggcctcacccccaacccggtcatcctccaggactgcatgtggagcggcttctccgcccgcgagaagctggagcgcgccgtgagcgagaagctgcagcacggccgcgggccgccaaccgccggttccaccgcccagtccccgggagccggcgccgccagccctgcgggtcgcgggcacggcggggctgcgggagccggccgcgccggggccgccctgcccgccgagctcgcccacccggccgccgagtgcgtggatcccgccgtggtcttcccctttcccgtgaacaagcgcgagccagcgcccgtgcccgcagccccggccagtgccccggcggcgggccctgcggtcgcctcgggggcgggtattgccgccccagccggggccccgggggtcgcccctccgcgcccaggcggccgccagaccagcggcggcgaccacaaggccctcagtacctccggagaggacaccctgagcgattcaggtaaagaccgaactcgggtccggctgcctccctggggcactggaccccgggtcgcgtcccctttgttagtgctcgtatgtcttggcctggggagcattttggaggcagtgctaggggcagagaggtcctgtttcccccaagtctctcctcggggtaaagagaaggggctgagagaatgccgttgcaaaaggggtgctctccaattctcgccttcactaaagttccttccaccctctcctggggagccctcctctaggccatcacgggccctcacccggtcccccacctctcttttgcaggcagtctgaggaataaaattggagaagttggtggctaaaccgggtgggggtttagggggttgctgggtgcactgcctggacagaaacctgattgcgcaggggtgaaagggactctctggcccaggtcaggggagggaaagacatcccgagaagattcaagggctgtgcaaagccctgtttaaggcgcaggaacttataggagggttgcacagatggctagagccgattttctattctttttctttttctttttttttttttttcaaatgtcggtacctttcccttcccccatcctcggtgggtggtgggctatttgctcctgttcgtggccagcaggcggcgatatgcgaggccagcaggcgggcccgggatctgaaaggctgggggtggtgggggcaccctccctccctccattcagcagctggctgcaagtgcaacagcagttgtgtacattctcagggggcctcctctttccagtgtgcagtggaaactggctgtagttttgtcttccagcctgaattccaggcctaatttgagatgtgagttgtatctaacccagtgcccttgaaggtgagggcaggcactcagcagcctctccaggaaggctcacatcctgggaggactcactgattagttctattgtgttcatttgtctgtgtcttaagctgaagggaagagttaaaaccaagcctttccctgggggtctggatgaacagaactcaacccaaagagtggcattgccttgtccttggagcagggagctgggaccccccttggactttgaaaacagtgttttcagaatgcaggtggataacaagcctaaatttacttctgggctgaggagagatctttgaggctcctggaaggaaacttggtgataagcctccagtttgaaacggctctgtccctttaatgtctgtgccttgacagcttttggtgaggaagcacttccttccaacagctgtcttcttggcagaaaaccaaaacattggcttaaagggacccacagactggaacagcctcacatttcggctttagaacaaatcccacaattgttcagctttccggtccccttcagatcaagcagaagatatgttttgattttcatgcttgtattttaaacaataattttctaccccagcgtggtagtcaatgaggagagaggggaagaatgcgcacatgatgctacacgtttctgttgttgctgttattattggtggctttgaggagagctgctcccatttggggtttataccaactgtggattatggctttgtcattaagatttgatctttgttaaatgaaaaactgtttattgtataaaactcaggtttgtggacgaaaagttgttttttttcttcagttaattaaattgttcctcaagtttgtttaaggacttaaaatcaaacacaaccatgtgtaaactgctaaatgaggctcctaaaatgagaggcctcaactctttaagtgtggagctagaaatgtaaataagtccacagggcagactggtgattatgataaaagctaccatttactgagcatctgtctactaggctcagctctatgctaagtctacatgttatctgtcaaagtggtatcatccccatttaatagctgaggaaacagaggcttagaaaggctgggtaacttgaccagggtcatgcaactagtctgcggtggagccaggattctgtctgaccctaaaggccaaggttctttatatttatttctaccacctgctaaagtcttgaatggaggctgaaagcacagttggggtatggggaaagaaaatatatatacatacatatatgtatatgtatgtatgtatgtatggggggttgttttgtttttgtttttgataaggagttttgctcttgttgcccaggctggagtgcagtggtatgatctgggctcactgcaacctccgccacccgggttcaagtcattctcctgcctcagcctcccgagtagctgggattaccggagcatgccaccacacccagcaaagttttgtatttttagtagagacagggtttcaccatgttggccaggctgatcttgaactcctcatctcaggtgatctgccgcctccgcttcccaaagtgctgggattacaggtgtgagtcaccgcgtccggcctacagatatatttaatttaaagatctaaaacaaatacaaaactgtccacatctatgttgatggacccataaaaatagcagtctgccagggtctgccggaagagacagataagcatacatattaacatggatatatatgtgaatttcattcaaatggttctcacatgagagtaactagcatctttctctcagatgatgaagatgatgaagaggaagatgaagaggaagaaatcgacgtggtcactgtggagaagcggcgttcctcctccaacaccaaggctgtcaccacattcaccatcactgtgcgtcccaagaacgcagccctgggtcccgggagggctcagtccagcgagctgatcctcaaacgatgccttcccatccaccagcagcacaactatgccgccccctctccctacgtggagagtgaggatgcacccccacagaagaagataaagagcgaggcgtccccacgtccgctcaagagtgtcatccccccaaaggctaagagcttgagcccccgaaactctgactcggaggacagtgagcgtcgcagaaaccacaacatcctggagcgccagcgccgcaacgaccttcggtccagctttctcacgctcagggaccacgtgccggagttggtaaagaatgagaaggccgccaaggtggtcattttgaaaaaggccactgagtatgtccactccctccaggccgaggagcaccagcttttgctggaaaaggaaaaattgcaggcaagacagcagcagttgctaaagaaaattgaacacgctcggacttgctagacgcttctcaaaactggacagtcactgccactttgcacattttgattttttttttaaacaaacattgtgttgacattaagaatgttggtttactttcaaatcggtcccctgtcgagttcggctctgggtgggcagtaggaccaccagtgtggggttctgctgggaccttggagagcctgcatcccaggatgctgggtgccctgcagcctcctccacctcacctccatgacagcgctaaacgttggtgacggttgggagcctctggggctgttgaagtcaccttgtgtgttccaagtttccaaacaacagaaagtcattccttctttttaaaatggtgcttaagttccagcagatgccacataaggggtttgccatttgatacccctggggaacatttctgtaaataccattgacacatccgccttttgtatacatcctgggtaatgagaggtggcttttgcggccagtattagactggaagttcatacctaagtactgtaataatacctcaatgtttgaggagcatgttttgtatacaaatatattgttaatctctgttatgtactgtactaattcttacactgcctgtatactttagtatgacgctgatacataactaaatttgatacttatattttcgtatgaaaatgagttgtgaaagttttgagtagatattactttatcactttttgaactaagaaacttttgtaaagaaatttactatatatatatgcctttttcctagcctgtttcttcctgttcatgtatttgttcatgtttggtgcatagaactgggtaaatgcaaagttctgtgtttaatttcttcaaaatgtatatatttagtgctgcatcttatagcactttgaaatacctcatgtttatgaaaataaatagcttaaaattaaatgatgcaactcaaccttttccttaatggcattacactctgcccttaaggagcaaccataaataatccataacctatagagggaatttggtttccgtaaatagccctttttgcacctgtacaatcctggttggggggcatgagtcatgtccccacttaaggtggagggaactgagtttggggaaattaaggcagttctccaagattatgcagaatagagatgttattagcgact

SEQ ID NO: 98 - DNA, 6107 bp, Staphylococcus aureus
  CDS (2507)..(3778)
  CDS (3813)..(4529)
agatctatcaaggatgtgatgttatgaaagtccaaatttatcaattaccgattgtttttggagatagttctaaaaatgaaactcaaataacgcaatggttcgaaaaaaatatgaatgctgaagtagatgtagtcgttttacctgaaatgtggaataatggctatgatttagagcatttaaatgaaaaagcagataataatctaggacaaagtttttcatttattaaacatttagctgaaaaatataaagtcgatatcgtagctgggtctgtttctaacattagaaacaatcaaatatttaatacagcttttagtgtgaataaaagtggccagctgattaatgaatacgacaaagttcatttagttcctatgttaagagagcatgaatttttaaccgctggcgaatacgtagctgaaccctttcaattgtctgacggtacttatgtgacccaacttatctgttatgatttacgttttccagaattattaagatatcctgctcgtagtggtgctaaaattgcattttatgtggcgcaatggcctatgtcacgtcttcaacattggcattcattactaaaggcacgtgcaattgaaaataatatgtttgtcattggaactaatagcactggattcgatggtaacacagaatatgctggtcattcgatagttataaacccaaatggagatttagttggagaattaaatgaatccgcagatattttgactgtagatttaaacttaaatgaagtagaacagcaacgcgaaaatatacctgtatttaaaagtattaaattagatttgtataaataagaagcgcccgaaataatatttaacacatgtcatgactaaacatagatttatgagagatttttcataagtctatgtttatttttttataatagataactcagtaagaacccatttcgccctttgcaaatgaatgattttcttaattaaattgattaattttttgaccttttccaacattagacttattcatatattttaacggcgggtctcataatgatgattaactcatcccttcttcattacaaaaaaggccgcgagcttgggaggggctcacgaccatacttattattaagggaatgttttacagttattttttcaatctatttttggggatgttattaattatgaaaaaaattttatttatcaaataatgataaatcgatgttgtttacgatagcttacatgctagaaataattatctgtaatgataattaagaaaaatacatagcactgagtccaaggaaactaactctactagcaaatgttactcacttgctaattttacatggttattaagttgggatggcttaataactcatacttttagtactatacgaagataacaaatttacaatgaaagtaattaattattcatcttattttttagtgaatttgttcactgtgtcgataatccattttactaagtcaccgattgttgaaatgatatcttgtgccattgaaatcactccttccttaattaagataaaaattcttaaaattaaacaactcatcaactattttccatcacatctctgtgatctagttatattaaaacatgctaaaagcatttattttccaatttttcttaactagtcgttttttattcttaactgtaaatttttttatgttaaaatattaaatacaaattacatttaacagttaagtatttatttcctacagttaggcaatataatgataaaagattgtactaaatcgtataatgacagtgaggagagtggtgtaaaattgaattattttgataataaaattgaccagtttgccacgtatcttcaaaagagaaataacttagatcatattcaatttttgcaagtacgattagggatgcaggtcttagctaaaaatataggtaaattaattgttatgtatactattgcctatattttaaacatttttctgtttacgttaattacgaatttaacattttatttaataagaagacatgcacatggtgcacatgcaccttcttctttttggtgttatgtagaaagtattatactatttatacttttacctttagtaatagtaaattttcatattaactttttaattatgattattttaacagttatttctttaggtgtaatctcagtatatgctcctgcagcaactaaaaagaagcccattcctgtgcgacttattaaacgaaaaaaatattatgcgattattgttagtttaacccttttcattatcacacttatcatcaaagagccatttgcccaattcattcaattaggcatcataatagaagctattacattattacctattttctttattaaggaggacttaaaatgaatacattatttaacttattttttgattttattactgggattttaaaaaacattggtaacatcgcagcttatagtacttgtgacttcataatggatgaagttgaagtaccaaaagaattaacacaattacacgaataatttaaatagagagtgtgatagtaggtggaattattaaatagttataattttgttttattcgtattaactcaaatgatattaatgtttacaataccagctataattagtggtattaagtacagtaaacttgattattttttcatcatagtaatttcgacattatcgttatttctatttaaaatgtttgatagcgcgtccttaatcatattaacttcatttattattataatgtattttgtcaaaatcaaatggtattctattttgttgattatgacttcgcagattattctatactgtgctaactacatgtatatagttatatatgcatatatcaccaaaatttctgatagtatatttgtaatattccctagcttttttgtagtttatgtgactattagtatactattctcatatataataaatagagttctcaaaaaaattagcacaccatatctaatactaaacaaaggatttttaatagttatttcgactatcttactgcttactttttcattatttttcttttattcacaaataaactcggatgaagctaaagtaataaggcagtattctttattttattggtatcactatattttaagtatattaacattgtattctcaatttctccttaaagagatgaaatataaacgtaatcaagaagaaattgaaacctattatgaatatacattgaagattgaagctatcaacaacgaaatgcgcaagttccgtcatgattatgtcaatatcttaacgacactttcagaatacattcgagaagatgacatgcctggcctacgtgattatttcaataaaaatattgtacctatgaaagacaatttacaaatgaatgctataaaattaaatggtatcgagaatcttaaagtacgtgaaattaaaggcttaattactgcgaaaattttacgtgcacaagaaatgaatattccgattagtatcgaaatacccgatgaagtaagtagcattaacttgaatatgatcgatttaagtcgcagtattggtattattcttgataatgcaattgaggcatcaactgaaattgatgaccctatcattcgcgttgcatttattgaaagtgaaaattcagtaacgtttattgttatgaataaatgcgctgatgatataccacgcattcatgaattgttccaagaaagtttttctactaaaggtgaaggtcgtggtttaggtctatcaactttaaaagaaattgctgataatgcagacaatgtcttattagatacaattatcgaaaatggtttcttttattcaaaaagttgaaattattaacaactagccataaggatgtgaatgtatgaaaattttcatttgcgaagacgatccaaaacaaagagaaaacatggttaccattattaaaaattatataatgatagaagaaaagcctatggaaattgccctcgcaactgataatccttatgaggtgcttgagcaagctaaaaatatgaatgacataggctgttactttttagatattcaactttcaactgatattaatggtatcaaattaggcagtgaaattcgtaagcatgacccagttggtaacattattttcgttacgagtcacagtgaacttacctatttaacatttgtctacaaagttgcagcgatggattttatttttaaagatgatccagctgaattaagaactcgaattatagactgtttagaaactgcacatacacgcttacaattgttgtctaaagataatagcgttgaaacgattgaattaaaacgtggcagtaattcagtgtatgttcaatatgatgatattatgttttttgaatcatcaacaaaatctcacagactcattgcccatttagataaccgtcaaattgaattttatggtaatttaaaagaactgagtcaattagatgatcgtttctttagatgtcataatagctttgtcgtcaatcgccataatattgaatctatagattcgaaagagcgaattgtctattttaaaaataaagaacactgctatgcatcggtgagaaacgttaaaaaaatataataagataataaagtcagttaacgacgtattcaattgtaaatcttgttggattttaacaagataactagcaaatgcactgtatagctggctttttaattttattaacaaaattaaatatgacgcgtgaattaaaaaatgatgtaacgtctctttgtatacctattcctattactacataatttatcaatttctatttcactctacaatcctatggcgcaatttttaacaaaatatactaaatttgaaattgacagtttccataaataaaatgctataatttcctactccgtgaatcttattttgtttaaaaaaacagtgtagcacaagattcaacttgtttcctacactgttttataaatgaattatttaaaatgcttgttcaacctcttgtaatgttggcaaactattaatagcaccatacttcgttgtcactattgcagcaacgcgattgctaaacgctaaaatttcctcaccttcattttcaaataactgagttaaatttaacacatcggttgctaaaatcctgctaataactgcaccaataaatgcatcccctgccccagttgtatcaacaggttttaccttatagccactatgataatgattaataccatttttcaaatatacggcagcaccatctgctcccttcgtataaatgactacagtaacattacctgtaaataatgattgaatggcttcattttcatcatgaatacctgtaataaattctaattcttcatctgaaacttttacaatatgcgccaatggcaaaaaggtatgaatagtttgtcttaaatcttcagcgttatcccataatggcaatcttacattaggatcaaatacgacagtaccatttgcatttaatgttttggtaatcaattgataatgtgcatctctcatcggactatcgaccaaatcaacagaacaaaaatgtactacatcattttcattcacatcaatatcattcacaaaacttggttcaaataacatatcagcagagggcttacgataaaaagaaaaatctcgctcgcccgcttcagtcaaactcacaaaagctaacgcagtgtttgcttcattcgtgcgatacacttttgatacatctacaccaatacttgatatcgtttcaataatgctatctccaaatgcatcattacctaattgtgtaatcatatacgcttgttgtcctaacttttgaactgtacaagctacattgcatggcgcgccaccaatttgcttcgtaaatgtttgaacatcttttaaattcgcatttgtaacatttggaataaaatcaattaacgcttctcctattgaaaatagacgtctcatttatgttcatcctttaaatcatatttagtaaattgtaaatatacttgccctgattctgttgatgttttaatacctagtgcgtcttctgtcgggaaaattcgagatgtcaaaacacgttctccatcattacagaaaatttctatactagatgtatcaacaaaaatttgtaattgctttaatggcgtgtctaatatcgtactacgcgtcgtaccttcaacatttgtcggcaataaaccactgtcgctgcgatcc

SEQ ID NO: 99 - protein, 423 aa, Staphylococcus aureus
VELLNSYNFVLFVLTQMILMFTIPAIISGIKYSKLDYFFIIVISTLSLFLFKMFDSASLIILTSFIIIMYFVKIKWYSILLIMTSQIILYCANYMYIVIYAYITKISDSIFVIFPSFFVVYVTISILFSYIINRVLKKISTPYLILNKGFLIVISTILLLTFSLFFFYSQINSDEAKVIRQYSLFYWYHYILSILTLYSQFLLKEMKYKRNQEEIETYYEYTLKIEAINNEMRKFRHDYVNILTTLSEYIREDDMPGLRDYFNKNIVPMKDNLQMNAIKLNGIENLKVREIKGLITAKILRAQEMNIPISIEIPDEVSSINLNMIDLSRSIGIILDNAIEASTEIDDPIIRVAFIESENSVTFIVMNKCADDIPRIHELFQESFSTKGEGRGLGLSTLKEIADNADNVLLDTIIENGFFYSKS

SEQ ID NO: 100 - protein, 238 aa, Staphylococcus aureus
MKIFICEDDPKQRENMVTIIKNYIMIEEKPMEIALATDNPYEVLEQAKNMNDIGCYFLDIQLSTDINGIKLGSEIRKHDPVGNIIFVTSHSELTYLTFVYKVAAMDFIFKDDPAELRTRIIDCLETAHTRLQLLSKDNSVETIELKRGSNSVYVQYDDIMFFESSTKSHRLIAHLDNRQIEFYGNLKELSQLDDRFFRCHNSFVVNRHNIESIDSKERIVYFKNKEHCYASVRNVKKI

SEQ ID NO: 101 - DNA, 7499 bp, Escherichia coli
  CDS (444)..(1475)
  CDS (1478)..(2590)
  CDS (2592)..(3386)
  CDS (3426)..(4361)
  CDS (4375)..(5481)
  CDS (5484)..(6503)
  CDS (6543)..(7487)
atagtaaatagctgacttatggatgtgctggggattctatgtatttagctgtggctttaccattacttttcccgtttttgacttaaatagcttcagtttggtctgatctgccgctacatcttcattttttttgtatttttatgcgattcattgaaactcggccccattttcaaatctacataggccgtactgacattatcgaaatgctattttttatctatttgatttttatgattaaagtatattttgtgtataaaaatcattcgggtcggattgctgcgaaagaaatgatacactagcacgtcaaagtaagtgcgttatcagtattcaggtagctgttgagcctggggcggtagcgtgcttttttctgcttaacttaaccagacaatcacacaaaagagtcgctagtggaaaagccatttcgaaaaatcctggtcataaagatgcgatatcatggggatatgttattaactactcctgtcatcagtacgctcaagcagaattatcctgatgcaaaaatcgatatgctgctttatcaggacaccatccctattttgtctgaaaacccggaaattaatgcgctctatgggataagcaataaaggtgcgggaactttcgataaaattaaaaatgtgctttcgttgataaaaactctgcgtgcgaataattatgacctggtcattaatcttacggatcagtggatggtggcgctgctggtacgttgtttacctgcacggatgaaaatatcgcaactttatggtcatcggcagcatggtatttggaaaaaaagcttcacacacttagcgccaatacacggtacacatattgttgagcgtaatttatcggtccttgagccattaggtattaccgatttctacaccgacacaacaatgagttacgccgaagattgctggaagaagatgcgccgggaattagatgccctgggcgtaaaagatcattatgttgtcatccaaccgacagcgcgtcagatatttaagtgttgggataacgataaattttctaaggttatcgatgcgctgcaacagcgaggctatcaggttgtgctaacctgtgggccctcggcagatgatctcgcttgtgtagatgagattgcacgaggttgcgaaacaaaacccattactggccttgcaggtaaaacacgttttcctgaactgggtgcattaattgatcatgcagtgctttttattggtgtggattctgcgccgggacatattgcagcggcagtgaaaacgccagtcattagtctatttggtgcaacggatcacgtattctggcgtccctggaccgagaatattattcaattctgggcggggaattatcagaaaatgccgacccggcatgaacttgaccgcaacaaaaaatatctttctgttatcccagcggaggatgtgatcgccgctacggaaaagctgttgccagaagatgccccttcagctgacaggaatgcacaattatgatcgtggcgttttgtttatataaatattttccatttggtgggcttcaacgtgactttatgcgcattgcatcaacagttgccgcacggggccaccatgttcgggtatatacacagtcgtgggaaggcgattgcccgaaagcatttgagcttattcaggtgccagttaagtcccataccaaccatggacgcaatgcagaatattatgcctgggtacaaaatcatctcaaagagcatcccgcagatcgcgttgttgggtttaataagatgcctggcctggatgtttattttgccgctgatgtttgttacgccgagaaagttgcgcaagaaaaaggttttttatatcgtttaacatcacgatatcgccattatgccgcatttgagcgagcgactttcgagcagggtaaatcgacgaaacttatgatgctgaccgataagcaaatcgccgatttccagaagcattatcaaactgaacctgaacgttttcaaattcttcctcccggtatttatccggacagaaaatacagtgagcaaatcccaaacagccgtgaaatttatcgccagaaaaatggcataaaagagcaacaaaacttattactgcaggttggatcagattttggccgtaaaggtgtagatcgctcaattgaagctttggcatcgttaccggaatcattacgtcacaatacgcttttatttgttgttggtcaggataagccgcgaaaatttgaagcgctggcagaaaaactcggcgtgcggagcaatgtgcatttcttctccggtcgcaatgatgtgtcagaattaatggcagccgctgatttattactgcatcccgcttatcaggaagccgcgggtatcgttcttctagaagcgatcactgctgggttacctgttttaacaacagcggtatgtgggtacgcgcattatattgcggatgccaattgtggaacggtcatcgctgaacctttctctcaggaacaattaaatgaagttttacgtaaagcgttaactcagtcgccattgcgaatggcctgggcggagaatgctcgccattatgccgatactcaggatttgtatagcttgccagaaaaagccgcggatatcattacaggtggtttagatggttgaattaaaagagccgcttgccacactttggcgtggtaaagatgcttttgcagaggtcaaaaaactgaacggcgaggtctttcgtgaactggagactcgtcgtacattacgctttgaactgtccgggaaaagctattttcttaaatggcacaaggggacgacattaaaagagattataaaaaatctactctcattgcggatgcccgttttgggcgcagacagagagtggcacgctattcatcgcctgagtgatgttggcgttgatacaatgaagggcattgggtttggcgaaaaagggttaaatccattaactcgcgcatcatttattattaccgaagatctcactcccacaattagccttgaagattattgtgccgattgggcagtcaacccgcctgatatacgtgttaagcgtatgctgatcgcacgtgtagcaactatggtgcgtaaaatgcatactgcagggataaatcaccgcgactgttacatttgccactttttgcttcatttgccatttactggccgggaagatgaattaaaaatttcagttatcgatctgcatcgggcacagatacgtgcaaaagtaccgcgccgctggcgcgataaagacctgattggtttatatttctcatcaatgaatattggcctgacgcaaagagatatctggcgatttatgaaggtttattttgggatgcctttacgcaaaatattgtctcttgaacagaatttattgaacatggcaagcgttaaggccgagcgtattaaagagcgaacacaacgcaaaggattataaaaatatttattagtatgtactggaactaactttattatgactatttattttataaattgggttgcagattatgaattaaaaatgattcagtacctgaaaaaaaagtacaagataaaaaatataacaacaccaaaaaaatataactggattaataaaaaaatatcaaaaatagggatggataatgcatggctggggcgattattcatcaagcattacctcaatgatattaaaaaagatgacataattatcattaatgacagtgttgttaataaaggtatcaataaacaaatattaaaaaatattaactgtcataaagttttgcttctaagaaatactgttggcgaagattttattcttgataacgcgaattatttcgatattatatatgattttgagcatagatttatagggaatgaaaagatcaaggcaatagaacaattttttcctataggaatggatgaaattagaaattatagtttatctgacaaaaataacagccagccaatatgttttttccttggtcgtgataaagggcgtcttcaaataattaatgagttagccgagagattaacaacactaggatgtaagctagattttaatgttgtcaaagataagacatcatctacgacttcaaagtatttgattgaaaaacaaatatcttatgaagagaatattagaagaacattaaatgctaatataattgttgatataaccaaagaaaaccaatctggctggactcttcgtatacttgaggcactatttttcaataaaaaattaattactaataatataaatgtatttggttcagaaatctatagtgaatctcgcttttttataataggtcatgatgattgggataagttagagtattttattaactcatctgttaaaccaatggattatgatagtttatataaattcagtccagataaaatgatgtcaacgattgtttctgattttatagacaaataaaaccgttaaaacagtgagttttactcaattaatgagagtttctatgaaaatagcgtttatcggcgaagctgtttctggatttggcggcatggaaactgtcatccgtgatgttattactaccttcaggcaacaacatatccaaagtgaaatgtttttcttttgtcgtaatgacaaaatggataagggatggctggaaggtattaaatactcatgttcattttccaatattcgtttaggttttttgcgtcgggcgaaacatattcatgctctaagtaaatggcttcaggagtaccaaccagatatcgttatttgtattgatgtgatctcctgcctgtttgccgcaaaagcacgtaaaaaatcaggaattgatatgccagtattttcatggccacatttttctttagatcacaaaaaacatgctgaatatatcacctgtgccgactatcatttagcaatcagctctggcattaaacagcaaatgattaatcgaggtgtagcagaatcgacgataaatgttatttttaatcccgtcgaaactaaagactcagtcattcccgcgcccgaggaaggtgaaacggcaacgtttatttatgttgggcgtatgaaatttgaaggccagaaaagagttaaagacctgcttgatggcttatcacaagcgaaaggtaactggaaactccatgtattgggtgatggctccgatttcgaaaaatgccaggcttatggtagagaattaaatattgatgatcgaattgtctggtatggttggcaacaatatccctgggaattggtccagcaagatattgaaaaagtgagtgcgttattgctcacgtcatcttttgaaggtttcccaatgaccctacttgaagccttgtcgtgggggattccttgtatcagtgccgattgtgtctccgggcctgctgacattattcaacctgatgtcaatggccatctgtatcaaccgggagatattgctggttttgtaactcttctaaataaatatatagcaggtgaaattcatatcgaacatgaaaaaattcctgcgtcgatcgatgaattttaccaatcgaagtattacgatagattacataaggtaattatttctgctatttcccggaggaaataatgcagcaggtgtttttccaggaaactgagtttcttaattcagttattgattatgatcataaagtagaaacagaaaatctttgtctggacatcgcttatggaactgacaaaaactttctatttggttgcggaatttcgattgcttcaatattaaaatataatgaaggaagtcgattgtgtttccatatttttactgattattttggtgatgatgatcgtaagtattttgatgccctggcgttgcagtataaaaccagaattaaaatatatctgattaatggtgatcgactgcgctcattgcctagcactaagaattggactcatgcaatatattttcgttttgttattgcagattactttattaataaggcgcctaaagtcctttatctggatgcagatatcatttgtcaggggactattgagccactaattaatttctcatttcctgacgataaagtcgcaatggttgttacagaagggcaagctgactggtgggaaaaacgcgcccattcgttaggtgttgcgggaattgctaaaggttactttaactccggttttttattgattaatactgcccaatgggcggctcagcaggtttctgcacgagctattgcaatgctaaatgagccagaaataatcaaaaaaataacacatcctgatcaggatgtgttaaatatgttgctggcggataaacttattttcgctgatattaaatataacacccagttcagcttaaattatcaactcaaagaaagctttataaacccagtaaccaacgatactatttttatccattatatcgggccaaccaagccctggcatgattgggcctgggattatcctgtatcacaagcctttatggaggcaaaaaatgcttcgccatggaagaatacggcgttgctgaaaccgaacaatagcaatcaattaagatatagcgcaaaacatatgcttaaaaagcatagatatctaaaaggatttagcaactatcttttttattttattgaaaagataaagcattaaaactgggaaactataaagtaatgatataagggtagcattgtggactcatttcctgccatagagatagataaagttaaagcctgggattttcggctagctaatataaatacttctgaatgtttaaatgttgcctatggtgtcgatgctaattatcttgatggtgtaggtgtttccatcacatcaattgtcctaaataatcgacatattaatcttgatttttatattattgctgatgtttataatgatggtttttttcaaaaaattgcaaagcttgcagagcaaaaccaattaagaatcacgttatatagaattaacactgataagctccagtgcttgccttgtacacaggtctggtcaagagcaatgtacttccgtttatttgcatttcaattattgggtttaacgcttgatcgtttgctttatcttgatgcagatgttgtttgtaaaggcgatattagccaactattacatctgggtttaaatggagcggttgctgctgttgttaaagatgttgagccaatgcaagaaaaggcggtatccaggttgtctgatcctgaattacttgggcagtactttaattccggtgtcgtttatttagacttaaaaaaatgggctgacgcaaaactaacagaaaaagcgttgtctattcttatgagtaaagataatgtttataaataccctgatcaggatgttatgaatgtcttactgaaagggatgacattatttttgcctcgtgagtacaatacaatttatacaattaaaagtgaattaaaagacaaaacacatcaaaactataaaaagctgattacagaaagtactcttcttattcattatacaggtgcaactaaaccgtggcacaaatgggcaatttatccatcggtaaaatactataaaatagctttagaaaattccccctggaaagatgactctccacgagatgcgaaatcaattattgaatttaaaaaagatataaacatcttttagtgcaacatcatt

SEQ ID NO: 102 - protein, 344 aa, Escherichia coli
MRYHGDMLLTTPVISTLKQNYPDAKIDMLLYQDTIPILSENPEINALYGISNKGAGTFDKIKNVLSLIKTLRANNYDLVINLTDQWMVALLVRCLPARMKISQLYGHRQHGIWKKSFTHLAPIHGTHIVERNLSVLEPLGITDFYTDTTMSYAEDCWKKMRRELDALGVKDHYVVIQPTARQIFKCWDNDKFSKVIDALQQRGYQVVLTCGPSADDLACVDEIARGCETKPITGLAGKTRFPELGALIDHAVLFIGVDSAPGHIAAAVKTPVISLFGATDHVFWRPWTENIIQFWAGNYQKMPTRHELDRNKKYLSVIPAEDVIAATEKLLPEDAPSADRNAQL

SEQ ID NO: 103 - protein, 371 aa, Escherichia coli
IVAFCLYKYFPFGGLQRDFMRIASTVAARGHHVRVYTQSWEGDCPKAFELIQVPVKSHTNHGRNAEYYAWVQNHLKEHPADRVVGFNKMPGLDVYFAADVCYAEKVAQEKGFLYRLTSRYRHYAAFERATFEQGKSTKLMMLTDKQIADFQKHYQTEPERFQILPPGIYPDRKYSEQIPNSREIYRQKNGIKEQQNLLLQVGSDFGRKGVDRSIEALASLPESLRHNTLLFVVGQDKPRKFEALAEKLGVRSNVHFFSGRNDVSELMAAADLLLHPAYQEAAGIVLLEAITAGLPVLTTAVCGYAHYIADANCGTVIAEPFSQEQLNEVLRKALTQSPLRMAWAENARHYADTQDLYSLPEKAADIITGGL

SEQ ID NO: 104 - protein, 265 aa, Escherichia coli
MVELKEPLATLWRGKDAFAEVKKLNGEVFRELETRRTLRFELSGKSYFLKWHKGTTLKEIIKNLLSLRMPVLGADREWHAIHRLSDVGVDTMKGIGFGEKGLNPLTRASFIITEDLTPTISLEDYCADWAVNPPDIRVKRMLIARVATMVRKMHTAGINHRDCYICHFLLHLPFTGREDELKISVIDLHRAQIRAKVPRRWRDKDLIGLYFSSMNIGLTQRDIWRFMKVYFGMPLRKILSLEQNLLNMASVKAERIKERTQRKGL

SEQ ID NO: 105 - protein, 311 aa, Escherichia coli
MTIYFINWVADYELKMIQYLKKKYKIKNITTPKKYNWINKKISKIGMDNAWLGRLFIKHYLNDIKKDDIIIINDSVVNKGINKQILKNINCHKVLLLRNTVGEDFILDNANYFDIIYDFEHRFIGNEKIKAIEQFFPIGMDEIRNYSLSDKNNSQPICFFLGRDKGRLQIINELAERLTTLGCKLDFNVVKDKTSSTTSKYLIEKQISYEENIRRTLNANIIVDITKENQSGWTLRILEALFFNKKLITNNINVFGSEIYSESRFFIIGHDDWDKLEYFINSSVKPMDYDSLYKFSPDKMMSTIVSDFIDK

SEQ ID NO: 106 - protein, 369 aa, Escherichia coli
VSFTQLMRVSMKIAFIGEAVSGFGGMETVIRDVITTFRQQHIQSEMFFFCRNDKMDKGWLEGIKYSCSFSNIRLGFLRRAKHIHALSKWLQEYQPDIVICIDVISCLFAAKARKKSGIDMPVFSWPHFSLDHKKHAEYITCADYHLAISSGIKQQMINRGVAESTINVIFNPVETKDSVIPAPEEGETATFIYVGRMKFEGQKRVKDLLDGLSQAKGNWKLHVLGDGSDFEKCQAYGRELNIDDRIVWYGWQQYPWELVQQDIEKVSALLLTSSFEGFPMTLLEALSWGIPCISADCVSGPADIIQPDVNGHLYQPGDIAGFVTLLNKYIAGEIHIEHEKIPASIDEFYQSKYYDRLHKVIISAISRRK

SEQ ID NO: 107 - protein, 339 aa, Escherichia coli
MQQVFFQETEFLNSVIDYDHKVETENLCLDIAYGTDKNFLFGCGISIASILKYNEGSRLCFHIFTDYFGDDDRKYFDALALQYKTRIKIYLINGDRLRSLPSTKNWTHAIYFRFVIADYFINKAPKVLYLDADIICQGTIEPLINFSFPDDKVAMVVTEGQADWWEKRAHSLGVAGIAKGYFNSGFLLINTAQWAAQQVSARAIAMLNEPEIIKKITHPDQDVLNMLLADKLIFADIKYNTQFSLNYQLKESFINPVTNDTIFIHYIGPTKPWHDWAWDYPVSQAFMEAKNASPWKNTALLKPNNSNQLRYSAKHMLKKHRYLKGFSNYLFYFIEKIKH

SEQ ID NO: 108 - protein, 314 aa, Escherichia coli
VDSFPAIEIDKVKAWDFRLANINTSECLNVAYGVDANYLDGVGVSITSIVLNNRHINLDFYIIADVYNDGFFQKIAKLAEQNQLRITLYRINTDKLQCLPCTQVWSRAMYFRLFAFQLLGLTLDRLLYLDADVVCKGDISQLLHLGLNGAVAAVVKDVEPMQEKAVSRLSDPELLGQYFNSGVVYLDLKKWADAKLTEKALSILMSKDNVYKYPDQDVMNVLLKGMTLFLPREYNTIYTIKSELKDKTHQNYKKLITESTLLIHYTGATKPWHKWAIYPSVKYYKIALENSPWKDDSPRDAKSIIEFKKDINIF

SEQ ID NO: 109 - DNA, 8391 bp, Mycobacterium bovis
  CDS (1)..(8391)
atgggtacgcgcactggcggccgaggacccggttccgtccgacaagcacctgacgtcggccgccgtgtcggtgcccggcgtgttgcttacccagatcgcggcgacccgggcgctggcccgtcaaggcatggacctcgtggccaccccgccggtcgccatggcgggcattcgcaaggtgtgctggcggtggaagccctcaaggctggtggggcacgcgacgtcgagctgtttgccttggcccagttgatcggtgccgccggaacgctggtggcccgccggcgcgaatttccgtcctgggcgatcgcgccgatggtatcggtcaccaacgccgaccccgagcgcatcggccggttgctcgacgagttcgcccaggacgtgcgcacggtgctgccaccggtgttgtccatccgcaacggccggcgtgccgtcgtcatcaccggcacccccgagcagctgtcgcgtttcgagctttattgccgccagatctccgagaaggaagaagccgaccgcaagaacaaggtccgcggcggcgacgtcttctcgccggtcttcgagccggtgcaggtggaggtgggctttcacaccccgcggctatccgacgggatcgacatcgtcgcgggctgggccgagaaggcgggcctcgatgtcgccttggctcgggagctggccgatgccatcttgatcagaaaggtcgactgggtcgacgagatcacccgtgtccaccgggccggcgcccgctggatcctcgacctggggccgggcgacatcctgacccgactgaccgcaccggtgatccgcggcctgggcatcggcatcgtgccggcgcgtacccgcggtggccagcgcaacctgttcaccgtcggcgccacccccgaggttgcccgggcctggtcgagctacgcaccgaccgtggttcgcctccccgacggcagggtcaagctctcgacgaagttcacccggctgacccgccgctcgccgatcctgctcgcgggcatgaccccgaccaccgtggacgccaagatcgtcgccgcggcggccaacggccggcactgggccgagctggcggcgcggggcaggtcaccgaagagatcttcggtaaccgcatcgaacaaatggccggcctgctcgagccgggccgcacctatcagttcaacgcgctgttcctcgatccctacctgtgaagcttcaggtgggcggcaagcggttggtgcagaaggcccgccagtccggcgccgcgatcgacggcgtggtgatcagcgccggcatcccagacctcgacgaggccgtcgagctgatcgacgaactgggcgacatcggcatcagccacgtcgtgttcaaacccgggaccatcgagcagatccgctcggtgattcgcatcgccaccgaggtgcccaccaagccggtgatcatgcacgtcgagggccgggcgcgccggcgggcaccattcctgggaggatctcacacctgctgctggctacctactcggcagatcgggcaccgcgccaacatcacgtgtgcgtcggcggcggccatctcggcaccccgaagaagggctgcggatatttgtccgggcctgggcgcagcgtacggcttcccattgatgccgatcgacgcatcctggtcggcaccgcggcgatggccaccaaggaatccaccacgtcgccatcggtcaagcggatgctcgtcgacactcagggcaccgaccaatggatcagcgccggaaaagcgcagggccgcatgcctccagccgagtcagctcggtgccgacatccacgagatcgacacagcgcatccgtgcggcgctgctcgacgaggtggccggtgacgcggaggcggtcgcggagcgtcgcatggccaagaccgccaagccctacttgccgacgtcgccgacatgacctacctgcagtggctgcgggcgctacgtcgaactggccatcggggaaggcaactcgaccgccgacaccgcctcggtgggcagcccgtggctggccgacactggcgggaccgcttcgagcagatgctgcagcgtgccgaagcccggttgcacccacaggatttcggcccgatccagacgctattcaccgatgctggcctgctggacaatccgcagcagcgatcgccgccctcgtggcgcgctaccccgacgccgagaccgtgcagttgcatcccgcggatgtgccctttttcgtgacgttgtgcaagacgctgggcaagccggtcaacttcgtgccggcgatcgacctcgtcgtgcgcgctggtggcgcagcgactcgctgtggcaggcccacgacgcccgctacgacgccgatgcggtgtgcatcattccgggcacgcgtcggtagccgcatcacccggatggatgaacccgtcggtgagttgctggacgctttcgagcaagccgcaatcgatgaagtgctcggcgccggtgtcgagccgaaggatgtcgcgtccggccggctgggccgggccgacgtggccggaccgttggctgtcgtcctcgacgcacccgatgtgcgctgggccggtcgcaccgtgaccaacccggtgcatcggatccgcgacccggccgaatggcaggtgcacgatggacccgaaaacccgcgcgccgcacactcatccaccggcgcccggctgcagacgcacggcgacgacgtcgccttgagcgtcgcgcgtctcgggcacctgggtcgacatccgattcacgttgccggccaacaccgtcgatggcggcaccccggtgatcgccaccgaggacgccaccacgccatgcgcacggtgctgcgatcgccgccggtgtcgacagcccggagttcttgctgcggtggccaacgggacggccactttgacggtggactggcaccccgagcgtgttgccgaccacaccgtcaccgccacgttcggtgcgcgctggcacccagcctcaccaacgtgccgacgcgactcgtcggcccttgttggccagcggttttcgcggccatcggatcggcggtcaccgacaccggtgagccggtggtggaaggcctgctgagcctggtgcatctggacacgcggccgcgcgtggtcggtcagctgcccacggtcccggcccaattgaccgtcacgcaacggctgccaacgcaaccgatacggacatgggccgcgtcgtgccggtctcggtcgtcgttcaccgcatggcgccgtgatcgccactctcgaggagcgattcgcgatcctgggtcgcaccggttcgccgagctggaccggcgcgagccggtggcgcggtgtcgcgaacgccaccgacaccccgcgcgtcgccgccgcgacgtcacgatcaccgcgccggtcgacatgcgcccgttcgcggtggtgtccggcgaccacaaccccattcacaccgaccgggccgccgctgcttgccggcctggagtcgccgatcgtgcacggcatgtggctgtcggccgcggcgcaacacgcggtgaccggcaccgacgggcaggcccgccaccggcccggctggtcggctggaccgcgcggtttttgggcatggtggccccggcgacgaggtggacttccggtcgagcgcgtcggatcgaccagggcgcagagattgtggacgtggccgcgcgcgtcgggtcggatctagtgatgtcggcctccgcgcgactggccgcacccaagacggtctacgcattccccggccagggcatccaacacaagggcatgggcatggaggtgcgcgccgctccaaggcggcccgcaaggtgtgggacaccgcggacaagttcacccgcgacaccctgggcttctcggtactgcacgtggtccgcgacaacccgaccagcatcatcgccagcggtgtgcactaccaccaccgacggggtgctctacctgacgcagttcacccaggtcgcgatggcgacggtggcggccgggcaggtcgccgagatgcgtgaacagggagccttcgtcgaaggcgccatcgcgtgcggccactcggtcggcgagtacaccgcgctggcctgcgtgaccggcatctaccaactggaagccttgctggagatggtgtttcaccgcgggtcgaagatgcacgacatcgttccgcgcgacgagctcggccgctccaactatcggctgtcggccatccggccgtcccagatcgacctcgacgacgccgacgtgcccgcgttcgtcgccgggatcgcggagagcaccggtgaattcctggagatcgagaatttcaacctcggtggctcgcaatacgcgatcgcgggcacggtacgcggcctcgaggcgctcgaggccgaggtggagcggcgccgcgagctcaccggcggccgacggtcgttcattttggtgcccggcatcgatgttccgttccactcgcgagtgctgcgggtcggggtggccgaattccggcgctcgctggaccgggtcatgcggccgacgcggacccgacctgatcatcgggcgctacattcccaacctggtgccgcggaagttcaaccctggaccgcgacttcatccaggaaatccgggatttggtgccccgccgagccgctcgacgagatcctcgccgactacgacacctggcttcgcgacgaccggcgagatggcgcgcacggtgttcatcgagctgctggcatggcaattcgccagcccggtgcgctggatcgagacgcaggatctgctgttcatcgaggaggcgccggcgggctgggtgtggagcgattcgtcgagatcggtgtgaagagctcaccgacggtggcggggtcttgccaccaacaccctcaaactgcccgaatacgcccacagcacagtgaagtgctcaacgccgagcgtgatgcgcggtgctgttcgccaccgacaccgacccggagccggagccggaggaagacgagccggtcgcggaatcgcccgcgccggacgtcgtctcggaagccgcccccgtcgcgccggccgcttcgtcggcgggcccgcgtcccgacgatctggttttcgacgccgccgatgccacgctgcgtgatcgcgctctcggccaagatgcgcatcgaccagatcgaagaactcgactccatcgagtccatcaccgacggtgcgtcgtcgcggcgcaaccagctgctggtggacctgggctccgagctgaacctcggtgccattgaacggcgccgccgaatcggacctggccggtctgcgctcacaggtgaccaaactggcgcgcacctacaacgttacggcccagtgctttccgacgccatcaacgaccacgttcgcaccgtcctcggaccgtcgggcaagcggcccggcgccatcgccgagcgggtgaagaagacctgggagctcggtgaggctgggccaagcatgtcaccgtcgaggtcgcgctgggcacccgcgagggcagcagcgttcgcggcggcgccatgggccacctgcacgagggcgcgctggccgatgccgcctccgtcgacaaggtcatcgacgcggcggtcgcatcggtggccgcggccagggcgtttcggtagcgctgcgtcggccggtagtggcggcgccaccatcgacgcggccgcgctcagcgagttcaccgaccaaatcaccggccgtgagggcgtgctgcctccgcggcccgcctggtgctggggcagctgggactggacgaccccatcaaccgttgccggccgccccgattccgagctgatcgacttggtcaccgccgaactgggacggactggccgcggttggtggcaccggtgttcgaccccaagaaggccgtcgtattcgacgaccgctggccagcgcccgcgaggacctggtgaagctgtggctgaccgacggaaggaccgaaggcgacatcgacgccgactggccgcgctggcggagcgcttcgagggtgccgccacgtcgtggcgacccaggctacctggtggcaaggtaagtcgctcgcgcgggccggcagatccatgcatcgctgtacggccgcatgccgccggcgccgagaaccccgaaccccgcgtacggcggcgaagttgccgtggtgaccggcgcttcgaagggttcgatcgccgcgtcggtggtggctcggctgctcgacgcggagccaccgtcatcgcgaccacctccaagctcgacgaggagcggctgcggttctaccgcacgctgtatcgcgaccacgcccgttacggcgcggcgctgtggctggtcgcggcgaacatggcgtcctactccgacgtcgacgccctggtcgaatggatcggcaccgaacagaccgaaagccttgggccgcagtcgattcacatcaaagacgcgcagaccccgacgctgctgttccgttcgcggcgcacgcgtgtcgggactgtcggaggccggttcgcgcgccgagatggagatgaaagtgctgctgtggcggtgcaacggctgatcggcggcctgtcgacgatcggcgccgaacgcgacatgccgtcgcggctcgagcgtggtgctgcccggctcgcccaaccgtggcatgttcggcggcgacgggccctacggcgaagccaagtccgcgctggatgccgtggtgacgcgctggcacgccgagtcgtcctgggcggcacgggtcagcctggcgcacgcgctcatcggctggacccgcggcaccgggctgatgggccacaacgatgccatcgtggccgccgtcgaagaggccggggtcaccacctactcgaccgacgagatggcgcggctgctgctcgacctgtgtcatgcggaatccaaggtggctgcggccgttcgccgatcaaggccgacctgaccgggggcctgccgaggccaacctcgacatggccgagctggcggccaaggcgcgcgagcagatgtcggcagcggcggccgtcgacgaggacgccgaggcccctggcgccatcgccgcgctgccgtcgccgccccggtttcacccccgcaccgccgccgcaatgggacgacctcgatgtcgacccggccgacctggtggtgatcgtcggcggccgcgaaatcggcccgtacggctcgtcacgcacccggttcgagatggaggtcgaaaacgagctgtcggcggccggcgtgctggagctggcctggaccactgggttgatcgctgggagacgacccgcaacccggttggtacgacaccgaatccggcgaaatggtcgacgaatccgagttggtgcagcgctacacgacgccgtggtgcagcgcgtcggcattcgcgaattcgttgatgacggcgcgatcgaccccgaccacgcctcgccgctgctggtgtcggtgttcctggagaaggacttcgcgttcgtggtgtcctcggaggccgatgcgcgcgccttcgtcgagttcgatcccgagcacacggtcatccggccggtgcccgactccaccgactggcaggtcatccgcaaggccggcaccgagatccgggtgccgcgaaagaccaagctgtcccgcgtcgtcggcggccagatcccgaccgggttcgacccgacggtgtggggcatcagcgcagacatggccggttccatcgaccggttggcggtatggaacatgtggcggaccgtcgaccggttcctgtcgtccggtttcagcccggccgaggtgatgcgttacgtgcacccgagtttggtggccaacacccagggcaccggcatgggcggcggcacgtcgatgcagacgatgtaccacggcaatctgttgggccgcaacaagccgaacgacatcttccaggaagtcttgccgatatcattcgccgcgcacgtggttcagtcctacgtcggtagctacggtgcgatgatccacccggtagccgcgtgcgccaccgccgcggtgtcggtcgaggaaggtgtcgacaagatccggttgggaaggctcaactggtggtcggcggccgtggatgacctgacgctggagggcatcatcggattcggtgacatggccgccaccgccgacacgtccatgatgcgcggccgcggcatccacgactcgaagttttcccggcccaacgaccgccgccgtctggcttcgtcgaagcccaaggcggcgggacgatcctgttgggcgcggggacctggcgctgcggatggggctgccggtgctggcggtggtgggttcgcgcagtcgttcggcgacggcgtgcacacctcgatccgccccgggcctgggcgcgctgggggcggcgcgcggcggcaaggattcagctgcggcgggcgctggccaagctgcgtggccgccgacgacgtggcggtcatctccaagcacgacacctcgacgctggccaacgatcccaacgagaccgagttgcatgaacggctcgccgacgccctgggccgttccgagggcgccccgctgttcgtggtgtcgcagaagagcctgaccggccagccaagggcggcgcggcggtcttccagatga

SEQ ID NO: 110 - protein, 2796 aa, Mycobacterium bovis
MGTRTGGRGPGSVRQAPDVGRRVGARRVAYPDRGDPGAGPSRHGPRGHPAGRHGGHSQGVLAVEALKAGGARDVELFALAQLIGAAGTLVARRREFPSWAIAPMVSVTNADPERIGRLLDEFAQDVRTVLPPVLSIRNGRRAVVITGTPEQLSRFELYCRQISEKEEADRKNKVRGGDVFSPVFEPVQVEVGFHTPRLSDGIDIVAGWAEKAGLDVALARELADAILIRKVDWVDEITRVHRAGARWILDLGPGDILTRLTAPVIRGLGIGIVPARTRGGQRNLFTVGATPEVARAWSSYAPTVVRLPDGRVKLSTKFTRLTRRSPILLAGMTPTTVDAKIVAAAANGRHWAELAARGRSPKRSSVTASNKWPACSSRAAPISSTRCSSIPTCEASGGRQAVGAEGPPVRRRDRRRGDQRRHPRPRRGRRADRRTGRHRHQPRRVQTRDHRADPLGDSHRHRGAHQAGDHARRGPGAPAGTIPGRISHLLLATYSADRAPRQHHVCVGGGHLGTPKKGCGYLSGPGRSVRLPIDADRRILVGTAAMATKESTTSPSVKRMLVDTQGTDQWISAGKAQGRMPPAESARCRHPRDRHSASVRRCSTRWPVTRRRSRSVAWPRPPSPTCRRRRHDLPAVAAGATSNWPSGKATRPPTPPRWAARGWPTLAGPLRADAAACRSPVAPTGFRPDPDAIHRCWPAGQSAAAIAALVARYPDAETVQLHPADVPFFVTLCKTLGKPVNFVPAIDLVVRAGGAATRCGRPTTPATTPMRCASFRARVGSRITRMDEPVGELLDAFEQAAIDEVLGAGVEPKDVASGRLGRADVAGPLAVVLDAPDVRWAGRTVTNPVHRIRDPAEWQVHDGPENPRAAHSSTGARLQTHGDDVALSVARLGHLGRHPIHVAGQHRRWRHPGDRHRGRHHAMRTVLRSPPVSTARSSCCGGQRDGHFDGGLAPRACCRPHRHRHVRCALAPSLTNVPTRLVGPCWPAVFAAIGSAVTDTGEPVVEGLLSLVHLDTRPRVVGQLPTVPAQLTVTQRLPTQPIRTWAASCRSRSSFTAWRRDRHSRGAIRDPGSHRFAELDRREPVARCRERHRHPARRRRDVTITAPVDMRPFAVVSGDHNPIHTDRAAAACRPGVADRARHVAVGRGATRGDRHRRAGPPPARLVGWTARFLGMVAPATRWTSGRARRIDQGAEIVDVAARVGSDLVMSASARLAAPKTVYAFPGQGIQHKGMGMEVRAAPRRPARCGTPRTSSPATPWASRYCTWSATTRPASSPAVCTTTTDGVLYLTQFTQVAMATVAAGQVAEMREQGAFVEGAIACGHSVGEYTALACVTGIYQLEALLEMVFHRGSKMHDIVPRDELGRSNYRLSAIRPSQIDLDDADVPAFVAGIAESTGEFLEIENFNLGGSQYAIAGTVRGLEALEAEVERRRELTGGRRSFILVPGIDVPFHSRVLRVGVAEFRRSLDRVMRPTRTRPDHRALHSQPGAAEVQPWTATSSRKSGIWCPAEPLDEILADYDTWLRDDRRDGAHGVHRAAGMAIRQPGALDRDAGSAVHRGGAGGLGVERFVEIGVKSSPTVAGSCHQHPQTARIRPQHSEVLNAERDARCCSPPTPTRSRSRRKTSRSRNRPRRTSSRKPPPSRRPLRRRARVPTIWFSTPPMPRCVIALSAKMRIDQIEELDSIESITDGASSRRNQLLVDLGSELNLGAIERRRRIGPGRSALTGDQTGAHLQRYGPVLSDAINDHVRTVLGPSGKRPGAIAERVKKTWELGEAGPSMSPSRSRWAPARAAAFAAAPWATCTRARWPMPPPSTRSSTRRSHRWPRPGRFGSAASAGSGGATIDAAALSEFTDQITGREGVLPPRPAWCWGSWDWTTPSTVAGRPDSELIDLVTAELGRTGRGWWHRCSTPRRPSYSTTAGQRPRGPGEAVADRRKDRRRHRRRLAALAERFEGAATSWRPRLPGGKVSRSRGPADPCIAVRPHAAGAENPEPRVRRRSCRGDRRFEGFDRRVGGGSAARRGATVIATTSKLDEERLRFYRTLYRDHARYGAALWLVAANMASYSDVDALVEWIGTEQTESLGPQSIHIKDAQTPTLLFRSRRTRVGTVGGRFARRDGDESAAVAVQRLIGGLSTIGAERDMPSRLERGAARLAQPWHVRRRRALRRSQVRAGCRGDALARRVVLGGTGQPGARAHRLDPRHRADGPQRCHRGRRRRGRGHHLLDRRDGAAAARPVSCGIQGGCGRSPIKADLTGGLPRPTSTWPSWRPRRASRCRQRRPSTRTPRPLAPSPRCRRRPGFTPAPPPQWDDLDVDPADLVVIVGGREIGPYGSSRTRFEMEVENELSAAGVLELAWTTGLIAGRRPATRLVRHRIRRNGRRIRVGAALHDAVVQRVGIREFVDDGAIDPDHASPLLVSVFLEKDFAFVVSSEADARAFVEFDPEHTVIRPVPDSTDWQVIRKAGTEIRVPRKTKLSRVVGGQIPTGFDPTVWGISADMAGSIDRLAVWNMWRTVDRFLSSGFSPAEVMRYVHPSLVANTQGTGMGGGTSMQTMYHGNLLGRNKPNDIFQEVLPISFAAHVVQSYVGSYGAMIHPVAACATAAVSVEEGVDKIRLGRLNWWSAAVDDLTLEGIIGFGDMAATADTSMMRGRGIHDSKFSRPNDRRRLASSKPKAAGRSCWARGPGAADGAAGAGGGGFAQSFGDGVHTSIRPGPGRAGGGARRQGFSCGGRWPSCVAADDVAVISKHDTSTLANDPNETELHERLADALGRSEGAPLFVVSQKSLTGQPRAARRSSR

SEQ ID NO: 111 - DNA, 192 bp, Homo sapiens
  CDS (1)..(192)
gatcttgctgcccgaaactgcctggtaggggagaaccacttggtgaaggtagctgattttggcctgagcaggttgatgacaggggacacctacacagcccatgctggagccaagttccccatcaaatggactgcacccgagagcctggcctacaacaagttctccatcaagtccgacgtctggggtaagggc

SEQ ID NO: 112 - protein, 64 aa, Homo sapiens
DLAARNCLVGENHLVKVADFGLSRLMTGDTYTAHAGAKFPIKWTAPESLAYNKFSIKSDVWGKG

SEQ ID NO: 113 - DNA, 3955 bp, Rattus norvegicus
  CDS (17)..(3799)
ccgggccggagccgcaatgatcatcatggagctggcggcctggtgccgctgggggttcctcctcgccctcctgccccccggaatcgcgggcacccaagtgtgtaccggcacagacatgaagttgcggctccctgccagtcctgagacccacctggacatgctccgccacctgtaccagggctgtcaggtagtgcagggcaacttggagcttacctacgtgcctgccaatgccagcctctcattcctgcaggacatccaggaagttcagggttacatgctcatcgctcacaaccaggtgaagcgcgtcccactgcaaaggctgcgcatcgtgagagggacccagctctttgaggacaagtatgccctggctgtgctagacaaccgagatcctcaggacaatgtcgccgcctccaccccaggcagaaccccagaggggctgcgggagctgcagcttcgaagtctcacagagatcctgaagggaggagttttgatccgtgggaaccctcagctctgctaccaggacatggttttgtggaaggacgtcttccgcaagaataaccaactggctcctgtcgatatagacaccaatcgttcccgggcctgtccaccttgtgcccccgcctgcaaagacaatcactgttggggtgagagtccggaagactgtcagatcttgactggcaccatctgtaccagtggttgtgcccggtgcaagggccggctgcccactgactgctgccatgagcagtgtgccgcaggctgcacgggccccaagcattctgactgcctggcctgcctccacttcaatcatagtggtatctgtgagctgcactgcccagccctcgtcacctacaacacagacacctttgagtccatgcacaaccctgagggtcgctacacctttggtgccagctgcgtgaccacctgcccctacaactacctgtctacggaagtgggatcctgcactctggtgtgtcccccgaataaccaagaggtcacagctgaggacggaacacagcgttgtgagaaatgcagcaagccctgtgctcgagtgtgctatggtctgggcatggagcaccttcgaggggcgagggccatcaccagtgacaatgtccaggagtttgatggctgcaagaagatctttgggagcctggcatttttgccggagagctttgatggggacccctcctccggcattgctccgctgaggcctgagcagctccaagtgttcgaaaccctggaggagatcacaggttacctgtacatctcagcatggccagacagtctccgtgacctcagtgtcttccagaaccttcgaatcattcggggacggattctccacgatggcgcgtactcattgacactgcaaggcctggggatccactcgctggggctgcgctcactgcgggagctgggcagtggattggctctgattcaccgcaacgcccatctctgctttgtacacactgtaccttgggaccagctcttccggaacccacatcaggccctgctccacagtgggaaccggccggaagaggacttgtgcgtctcgagcggcttggtctgtaactcactgtgtgcccacgggcactgctgggggccagggcccacccagtgtgtcaactgcagtcatttccttcggggccaggagtgtgtggaggagtgccgagtatggaaggggctcccccgggagtatgtgagtgacaagcgctgtctgccgtgtcaccccgagtgtcagcctcaaaacagctcagagacctgctttggatcggaggctgatcagtgtgcagcctgcgcccactacaaggactcgtcctcctgtgtggctcgctgccccagtggtgtgaaaccggacctctcctacatgcccatctggaagtacccggatgaggagggcatatgccagccgtgccccatcaactgcacccactcctgtgtggatctggatgaacgaggctgcccagcagagcagagagccagcccggtgacattcatcattgcaactgtagagggcgtcctgctgttcctgatcttagtggtggtcgttggaatcctaatcaaacgaaggagacagaagatccggaagtatacgatgcgtaggctgctgcaggaaactgagttagtggagccgctgacgcccagcggagcaatgcccaaccaggctcagatgcggatcctaaaagagacggagctaaggaaggtgaaggtgcttggatcaggagcttttggcactgtctacaagggcatctggatcccagatggggagaatgtgaaaatccccgtggctatcaaggtgttgagagaaaacacatctcctaaagccaacaaagaaattctagatgaagcgtatgtgatggctggtgtgggttctccgtatgtgtcccgcctcctgggcatctgcctgacatccacagtacagctggtgacacagcttatgccctacggctgccttctggaccatgtccgagaacaccgaggtcgcctaggctcccaggacctgctcaactggtgtgttcagattgccaaggggatgagctacctggaggacgtgcggcttgtacacagggacctggctgcccggaatgtgctagtcaagagtcccaaccacgtcaagattacagatttcgggctggctcggctgctggacattgatgagacagagtaccatgcagatgggggcaaggtgcccatcaaatggatggcattggaatctattctcagacgccggttcacccatcagagtgatgtgtggagctatggagtgactgtgtgggagctgatgacttttggggccaaaccttacgatggaatcccagcccgggagatccctgatttgctggagaagggagaacgcctacctcagcctccaatctgcaccattgatgtctacatgattatggtcaaatgttggatgattgactctgaatgtcgcccgagattccgggagttggtgtcagaattttcacgtatggcgagggacccccagcgttttgtggtcatccagaacgaggacttgggcccatccagccccatggacagtaccttctaccgttcactgctggaagatgatgacatgggtgacctggtagacgctgaagagtatctggtgccccagcagggattcttctccccggaccctaccccaggcactgggagcacagcccatagaaggcaccgcagctcgtccaccaggagtggaggtggtgagctgacactgggcctggagccctcggaagaagggccccccagatctccactggctccctcggaaggggctggctccgatgtgtttgatggtgacctggcaatgggggtaaccaaagggctgcagagcctctctccacatgacctcagccctctacagcggtacagcgaggaccccacattacctctgccccccgagactgatggctatgttgctcccctggcctgcagcccccagcccgagtatgtgaaccaatcagaggttcagcctcagcctcctttaaccccagagggtcctctgcctcctgtccggcctgctggtgctactctagaaagacccaagactctctctcctgggaagaatggggttgtcaaagacgtttttgccttcgggggtgctgtggagaaccctgaatacttagtaccgagagaaggcactgcctctccgccccacccttctcctgccttcagcccagcctttgacaacctctattactgggaccagaactcatcggagcaggggcctccaccaagtaactttgaagggacccccactgcagagaaccctgagtacctaggcctggatgtacctgtatgagacgtgtgcagacgtcctgtgctttcagagtggggaaggcctgacttgtggtctccatcgccacaaagcagggagagggtcctctggccacattacatccagggcagacggctctaccaggaacctgccccgaggaacctttccttgctgcttgaa

SEQ ID NO: 114 - protein, 1260 aa, Rattus norvegicus
MIIMELAAWCRWGFLLALLPPGIAGTQVCTGTDMKLRLPASPETHLDMLRHLYQGCQVVQGNLELTYVPANASLSFLQDIQEVQGYMLIAHNQVKRVPLQRLRIVRGTQLFEDKYALAVLDNRDPQDNVAASTPGRTPEGLRELQLRSLTEILKGGVLIRGNPQLCYQDMVLWKDVFRKNNQLAPVDIDTNRSRACPPCAPACKDNHCWGESPEDCQILTGTICTSGCARCKGRLPTDCCHEQCAAGCTGPKHSDCLACLHFNHSGICELHCPALVTYNTDTFESMHNPEGRYTFGASCVTTCPYNYLSTEVGSCTLVCPPNNQEVTAEDGTQRCEKCSKPCARVCYGLGMEHLRGARAITSDNVQEFDGCKKIFGSLAFLPESFDGDPSSGIAPLRPEQLQVFETLEEITGYLYISAWPDSLRDLSVFQNLRIIRGRILHDGAYSLTLQGLGIHSLGLRSLRELGSGLALIHRNAHLCFVHTVPWDQLFRNPHQALLHSGNRPEEDLCVSSGLVCNSLCAHGHCWGPGPTQCVNCSHFLRGQECVEECRVWKGLPREYVSDKRCLPCHPECQPQNSSETCFGSEADQCAACAHYKDSSSCVARCPSGVKPDLSYMPIWKYPDEEGICQPCPINCTHSCVDLDERGCPAEQRASPVTFIIATVEGVLLFLILVVVVGILIKRRRQKIRKYTMRRLLQETELVEPLTPSGAMPNQAQMRILKETELRKVKVLGSGAFGTVYKGIWIPDGENVKIPVAIKVLRENTSPKANKEILDEAYVMAGVGSPYVSRLLGICLTSTVQLVTQLMPYGCLLDHVREHRGRLGSQDLLNWCVQIAKGMSYLEDVRLVHRDLAARNVLVKSPNHVKITDFGLARLLDIDETEYHADGGKVPIKWMALESILRRRFTHQSDVWSYGVTVWELMTFGAKPYDGIPAREIPDLLEKGERLPQPPICTIDVYMIMVKCWMIDSECRPRFRELVSEFSRMARDPQRFVVIQNEDLGPSSPMDSTFYRSLLEDDDMGDLVDAEEYLVPQQGFFSPDPTPGTGSTAHRRHRSSSTRSGGGELTLGLEPSEEGPPRSPLAPSEGAGSDVFDGDLAMGVTKGLQSLSPHDLSPLQRYSEDPTLPLPPETDGYVAPLACSPQPEYVNQSEVQPQPPLTPEGPLPPVRPAGATLERPKTLSPGKNGVVKDVFAFGGAVENPEYLVPREGTASPPHPSPAFSPAFDNLYYWDQNSSEQGPPPSNFEGTPTAENPEYLGLDVPV

SEQ ID NO: 115 - DNA, 4989 bp, Homo sapiens
  CDS (46)..(4149)
ttttttttttttttgagaaagggaatttcatcccaaataaaaggaatgaagtctggctccggaggagggtccccgacctcgctgtgggggctcctgtttctctccgccgcgctctcgctctggccgacgagtggagaaatctgcgggccaggcatcgacatccgcaacgactatcagcagctgaagcgcctggagaactgcacggtgatcgagggctacctccacatcctgctcatctccaaggccgaggactaccgcagctaccgcttccccaagctcacggtcattaccgagtacttgctgctgttccgagtggctggcctcgagagcctcggagacctcttccccaacctcacggtcatccgcggctggaaactcttctacaactacgccctggtcatcttcgagatgaccaatctcaaggatattgggctttacaacctgaggaacattactcggggggccatcaggattgagaaaaatgctgacctctgttacctctccactgtggactggtccctgatcctggatgcggtgtccaataactacattgtggggaataagcccccaaaggaatgtggggacctgtgtccagggaccatggaggagaagccgatgtgtgagaagaccaccatcaacaatgagtacaactaccgctgctggaccacaaaccgctgccagaaaatgtgcccaagcacgtgtgggaagcgggcgtgcaccgagaacaatgagtgctgccaccccgagtgcctgggcagctgcagcgcgcctgacaacgacacggcctgtgtagcttgccgccactactactatgccggtgtctgtgtgcctgcctgcccgcccaacacctacaggtttgagggctggcgctgtgtggaccgtgacttctgcgccaacatcctcagcgccgagagcagcgactccgaggggtttgtgatccacgacggcgagtgcatgcaggagtgcccctcgggcttcatccgcaacggcagccagagcatgtactgcatcccttgtgaaggtccttgcccgaaggtctgtgaggaagaaaagaaaacaaagaccattgattctgttacttctgctcagatgctccaaggatgcaccatcttcaagggcaatttgctcattaacatccgacgggggaataacattgcttcagagctggagaacttcatggggctcatcgaggtggtgacgggctacgtgaagatccgccattctcatgccttggtctccttgtccttcctaaaaaaccttcgcctcatcctaggagaggagcagctagaagggaattactccttctacgtcctcgacaaccagaacttgcagcaactgtgggactgggaccaccgcaacctgaccatcaaagcagggaaaatgtactttgctttcaatcccaaattatgtgtttccgaaatttaccgcatggaggaagtgacggggactaaagggcgccaaagcaaaggggacataaacaccaggaacaacggggagagagcctcctgtgaaagtgacgtcctgcatttcacctccaccaccacgtcgaagaatcgcatcatcataacctggcaccggtaccggccccctgactacagggatctcatcagcttcaccgtttactacaaggaagcaccctttaagaatgtcacagagtatgatgggcaggatgcctgcggctccaacagctggaacatggtggacgtggacctcccgcccaacaaggacgtggagcccggcatcttactacatgggctgaagccctggactcagtacgccgtttacgtcaaggctgtgaccctcaccatggtggagaacgaccatatccgtggggccaagagtgagatcttgtacattcgcaccaatgcttcagttccttccattcccttggacgttctttcagcatcgaactcctcttctcagttaatcgtgaagtggaaccctccctctctgcccaacggcaacctgagttactacattgtgcgctggcagcggcagcctcaggacggctacctttaccggcacaattactgctccaaagacaaaatccccatcaggaagtatgccgacggcaccatcgacattgaggaggtcacagagaaccccaagactgaggtgtgtggtggggagaaagggccttgctgcgcctgccccaaaactgaagccgagaagcaggccgagaaggaggaggctgaataccgcaaagtctttgagaatttcctgcacaactccatcttcgtgcccagacctgaaaggaagcggagagatgtcatgcaagtggccaacaccaccatgtccagccgaagcaggaacaccacggccgcagacacctacaacatcaccgacccggaagagctggagacagagtaccctttctttgagagcagagtggataacaaggagagaactgtcatttctaaccttcggcctttcacattgtaccgcatcgatatccacagctgcaaccacgaggctgagaagctgggctgcagcgcctccaacttcgtctttgcaaggactatgcccgcagaaggagcagatgacattcctgggccagtgacctgggagccaaggcctgaaaactccatctttttaaagtggccggaacctgagaatcccaatggattgattctaatgtatgaaataaaatacggatcacaagttgaggatcagcgagaatgtgtgtccagacaggaatacaggaagtatggaggggccaagctaaaccggctaaacccggggaactacacagcccggattcaggccacatctctctctgggaatgggtcgtggacagatcctgtgttcttctatgtccaggccaaaacaggatatgaaaacttcatccatctgatcatcgctctgcccgtcgctgtcctgttgatcgtgggagggttggtgattatgctgtacgtcttccatagaaagagaaataacagcaggctggggaatggagtgctgtatgcctctgtgaacccggagtacttcagcgctgctgatgtgtacgttcctgatgagtgggaggtggctcgggagaagatcaccatgagccgggaacttgggcaggggtcgtttgggatggtctatgaaggagttgccaagggtgtggtgaaagatgaacctgaaaccagagtggccattaaaacagtgaacgaggccgcaagcatgcgtgagaggattgagtttctcaacgaagcttctgtgatgaaggagttcaattgtcaccatgtggtgcgattgctgggtgtggtgtcccaaggccagccaacactggtcatcatggaactgatgacacggggcgatctcaaaagttatctccggtctctgaggccagaaatggagaataatccagtcctagcacctccaagcctgagcaagatgattcagatggccggagagattgcagacggcatggcatacctcaacgccaataagttcgtccacagagaccttgctgcccggaattgcatggtagccgaagatttcacagtcaaaatcggagattttggtatgacgcgagatatctatgagacagactattaccggaaaggaggcaaagggctgctgcccgtgcgctggatgtctcctgagtccctcaaggatggagtcttcaccacttactcggacgtctggtccttcggggtcgtcctctgggagatcgccacactggccgagcagccctaccagggcttgtccaacgagcaagtccttcgcttcgtcatggagggcggccttctggacaagccagacaactgtcctgacatgctgtttgaactgatgcgcatgtgctggcagtataaccccaagatgaggccttccttcctggagatcatcagcagcatcaaagaggagatggagcctggcttccgggaggtctccttctactacagcgaggagaacaagctgcccgagccggaggagctggacctggagccagagaacatggagagcgtccccctggacccctcggcctcctcgtcctccctgccactgcccgacagacactcaggacacaaggccgagaacggccccggccctggggtgctggtcctccgcgccagcttcgacgagagacagccttacgcccacatgaacgggggccgcaagaacgagcgggccttgccgctgccccagtcttcgacctgctgatccttggatcctgaatctgtgcaaacagtaacgtgtgcgcacgcgcagcggggtggggggggagagagagttttaacaatccattcacaagcctcctgtacctcagtggatcttcagttctgcccttgctgcccgcgggagacagcttctctgcagtaaaacacatttgggatgttccttttttcaatatgcaagcagctttttattccctgcccaaacccttaactgacatgggcctttaagaaccttaatgacaacacttaatagcaacagagcacttgagaaccagtctcctcactctgtccctgtccttccctgttctccctttctctctcctctctgcttcataacggaaaaataattgccacaagtccagctgggaagccctttttatcagtttgaggaagtggctgtccctgtggccccatccaaccactgtacacacccgcctgacaccgtgggtcattacaaaaaaacacgtggagatggaaatttttacctttatctttcacctttctagggacatgaaatttacaaagggccatcgttcatccaaggctgttaccattttaacgctgcctaattttgccaaaatcctgaactttctccctcatcggcccggcgctgattcctcgtgtccggaggcatgggtgagcatggcagctggttgctccatttgagagacacgctggcgacacactccgtccatccgactgcccctgctgtgctgctcaaggccacaggcacacaggtctcattgcttctgactagattattatttgggggaactggacacaataggtctttctctcagtgaaggtggggagaagctgaaccggc

SEQ ID NO: 116 - protein, 1367 aa, Homo sapiens
MKSGSGGGSPTSLWGLLFLSAALSLWPTSGEICGPGIDIRNDYQQLKRLENCTVIEGYLHILLISKAEDYRSYRFPKLTVITEYLLLFRVAGLESLGDLFPNLTVIRGWKLFYNYALVIFEMTNLKDIGLYNLRNITRGAIRIEKNADLCYLSTVDWSLILDAVSNNYIVGNKPPKECGDLCPGTMEEKPMCEKTTINNEYNYRCWTTNRCQKMCPSTCGKRACTENNECCHPECLGSCSAPDNDTACVACRHYYYAGVCVPACPPNTYRFEGWRCVDRDFCANILSAESSDSEGFVIHDGECMQECPSGFIRNGSQSMYCIPCEGPCPKVCEEEKKTKTIDSVTSAQMLQGCTIFKGNLLINIRRGNNIASELENFMGLIEVVTGYVKIRHSHALVSLSFLKNLRLILGEEQLEGNYSFYVLDNQNLQQLWDWDHRNLTIKAGKMYFAFNPKLCVSEIYRMEEVTGTKGRQSKGDINTRNNGERASCESDVLHFTSTTTSKNRIIITWHRYRPPDYRDLISFTVYYKEAPFKNVTEYDGQDACGSNSWNMVDVDLPPNKDVEPGILLHGLKPWTQYAVYVKAVTLTMVENDHIRGAKSEILYIRTNASVPSIPLDVLSASNSSSQLIVKWNPPSLPNGNLSYYIVRWQRQPQDGYLYRHNYCSKDKIPIRKYADGTIDIEEVTENPKTEVCGGEKGPCCACPKTEAEKQAEKEEAEYRKVFENFLHNSIFVPRPERKRRDVMQVANTTMSSRSRNTTAADTYNITDPEELETEYPFFESRVDNKERTVISNLRPFTLYRIDIHSCNHEAEKLGCSASNFVFARTMPAEGADDIPGPVTWEPRPENSIFLKWPEPENPNGLILMYEIKYGSQVEDQRECVSRQEYRKYGGAKLNRLNPGNYTARIQATSLSGNGSWTDPVFFYVQAKTGYENFIHLIIALPVAVLLIVGGLVIMLYVFHRKRNNSRLGNGVLYASVNPEYFSAADVYVPDEWEVAREKITMSRELGQGSFGMVYEGVAKGVVKDEPETRVAIKTVNEAASMRERIEFLNEASVMKEFNCHHVVRLLGVVSQGQPTLVIMELMTRGDLKSYLRSLRPEMENNPVLAPPSLSKMIQMAGEIADGMAYLNANKFVHRDLAARNCMVAEDFTVKIGDFGMTRDIYETDYYRKGGKGLLPVRWMSPESLKDGVFTTYSDVWSFGVVLWEIATLAEQPYQGLSNEQVLRFVMEGGLLDKPDNCPDMLFELMRMCWQYNPKMRPSFLEIISSIKEEMEPGFREVSFYYSEENKLPEPEELDLEPENMESVPLDPSASSSSLPLPDRHSGHKAENGPGPGVLVLRASFDERQPYAHMNGGRKNERALPLPQSSTC

SEQ ID NO: 117 - DNA, 640 bp, Homo sapiens
  CDS (17)..(592)
tcgggcctccgaaaccatgaactttctgctgtcttgggtgcattggagccttgccttgctgctctacctccaccatgccaagtggtcccaggctgcacccatggcagaaggaggggggcagaatcatcacgaagtggtgaagttcatggatgtctatcagcgcagctactgccatccaatcgagaccctggtggacatcttccaggagtaccctgatgagatcgagtacatcttcaagccatcctgtgtgcccctgatgcgatgcgggggctgctgcaatgacgagggcctggagtgtgtgcccactgaggagtccaacatcaccatgcagattatgcggatcaaacctcaccaaggccagcacataggagagatgagcttcctacagcacaacaaatgtgaatgcagaccaaagaaagatagagcaagacaagaaaatccctgtgggccttgctcagagcggagaaagcatttgtttgtacaagatccgcagacgtgtaaatgttcctgcaaaaacacagactcgcgttgcaaggcgaggcagcttgagttaaacgaacgtacttgcagatgtgacaagccgaggcggtgagccgggcaggaggaaggagcctccctcagggtttcgggaaccagatct

SEQ ID NO: 118 - protein, 191 aa, Homo sapiens
MNFLLSWVHWSLALLLYLHHAKWSQAAPMAEGGGQNHHEVVKFMDVYQRSYCHPIETLVDIFQEYPDEIEYIFKPSCVPLMRCGGCCNDEGLECVPTEESNITMQIMRIKPHQGQHIGEMSFLQHNKCECRPKKDRARQENPCGPCSERRKHLFVQDPQTCKCSCKNTDSRCKARQLELNERTCRCDKPRR

SEQ ID NO: 119 - DNA, 3690 bp, Mus musculus
  CDS (256)..(3690)
ctggaggggtataaatacctgatggctgctgccagggtcacaactttacagggagttgaagactgagactctggccccacgggacacagtgtcactggtttgaaacttctcagccaccttggtgaagggactgagctgttagagacacttctgaggctcctcacgcttgggtcttgttcactccacggagtagcctagtcaactgcaagagaacggagaacgttggatttggagcagaagtgcaaagtctcagacatggcttgcccctggaagtttctcttcaaagtcaaatcctaccaaagtgacctgaaagaggaaaaggacattaacaacaacgtgaagaaaaccccttgtgctgttctcagcccaacaatacaagatgaccctaagagtcaccaaaatggctccccgcagctcctcactgggacagcacagaatgttccagaatccctggacaagctgcatgtgacatcgacccgtccacagtatgtgaggatcaaaaactggggcagtggagagattttgcatgacactcttcaccacaaggccacatcggatttcacttgcaagtccaagtcttgcttggggtccatcatgaaccccaagagtttgaccagaggacccagagacaagcctacccctctggaggagctcctgcctcatgccattgagttcatcaaccagtattatggctcctttaaagaggcaaaaatagaggaacatctggccaggctggaagctgtaacaaaggaaatagaaacaacaggaacctaccagctcactctggatgagctcatctttgccaccaagatggcctggaggaatgcccctcgctgcatcggcaggatccagtggtccaacctgcaggtctttgacgctcggaactgtagcacagcacaggaaatgtttcagcacatctgcagacacatactttatgccaccaacaatggcaacatcaggtcggccatcactgtgttcccccagcggagtgacggcaaacatgacttcaggctctggaattcacagctcatccggtacgctggctaccagatgcccgatggcaccatcagaggggatgctgccaccttggagttcacccagttgtgcatcgacctaggctggaagccccgctatggccgctttgatgtgctgcctctggtcttgcaagctgatggtcaagatccagaggtctttgaaatccctcctgatcttgtgttggaggtgaccatggagcatcccaagtacgagtggttccaggagctcgggttgaagtggtatgcactgcctgccgtggccaacatgctactggaggtgggtggcctcgaattcccagcctgccccttcaatggttggtacatgggcaccgagattggagttcgagacttctgtgacacacagcgctacaacatcctggaggaagtgggccgaaggatgggcctggagacccacacactggcctccctctggaaagaccgggctgtcacggagatcaatgtggctgtgctccatagtttccagaagcagaatgtgaccatcatggaccaccacacagcctcagagtccttcatgaagcacatgcagaatgagtaccgggcccgtggaggctgcccggcagactggatttggctggtccctccagtgtctgggagcatcacccctgtgttccaccaggagatgttgaactatgtcctatctccattctactactaccagatcgagccctggaagacccacatctggcagaatgagaagctgaggcccaggaggagagagatccgatttagagtcttggtgaaagtggtgttctttgcttccatgctaatgcgaaaggtcatggcttcacgggtcagagccacagtcctctttgctactgagacagggaagtctgaagcactagccagggacctggccaccttgttcagctacgccttcaacaccaaggttgtctgcatggaccagtataaggcaagcaccttggaagaggagcaactactgctggtggtgacaagcacatttgggaatggagactgtcccagcaatgggcagactctgaagaaatctctgttcatgcttagagaactcaaccacaccttcaggtatgctgtgtttggccttggctccagcatgtaccctcagttctgcgcctttgctcatgacatcgaccagaagctgtcccacctgggagcctctcagcttgccccaacaggagaaggggacgaactcagtgggcaggaggatgccttccgcagctgggctgtacaaaccttccgggcagcctgtgagacctttgatgtccgaagcaaacatcacattcagatcccgaaacgcttcacttccaatgcaacatgggagccacagcaatataggctcatccagagcccggagcctttagacctcaacagagccctcagcagcatccatgcaaagaacgtgtttaccatgaggctgaaatcccagcagaatctgcagagtgaaaagtccagccgcaccaccctcctcgttcagctcaccttcgagggcagccgagggcccagctacctgcctggggaacacctggggatcttcccaggcaaccagaccgccctggtgcagggaatcttggagcgagttgtggattgtcctacaccacaccaaactgtgtgcctggaggttctggatgagagcggcagctactgggtcaaagacaagaggctgcccccctgctcactcagccaagccctcacctacttcctggacattacgacccctcccacccagctgcagctccacaagctggctcgctttgccacggacgagacggataggcagagattggaggccttgtgtcagccctcagagtacaatgactggaagttcagcaacaaccccacgttcctggaggtgcttgaagagttcccttccttgcatgtgcccgctgccttcctgctgtcgcagctccctatcttgaagccccgctactactccatcagctcctcccaggaccacaccccctcggaggttcacctcactgtggccgtggtcacctaccgcacccgagatggtcagggtcccctgcaccatggtgtctgcagcacttggatcaggaacctgaagccccaggacccagtgccctgctttgtgcgaagtgtcagtggcttccagctccctgaggacccctcccagccttgcatcctcattgggcctggtacgggcattgctcccttccgaagtttctggcagcagcggctccatgactcccagcacaaagggctcaaaggaggccgcatgagcttggtgtttgggtgccggcacccggaggaggaccacctctatcaggaagaaatgcaggagatggtccgcaagagagtgctgttccaggtgcacacaggctactcccggctgcccggcaaacccaaggtctacgttcaggacatcctgcaaaagcagctggccaatgaggtactcagcgtgctccacggggagcagggccacctctacatttgcggagatgtgcgcatggctcgggatgtggctaccacattgaagaagctggtggccaccaagctgaacttgagcgaggagcaggtggaagactatttcttccagctcaagagccagaaacgttatcatgaagatatcttcggtgcagtcttttcctatggggcaaaaaagggcagcgccttggaggagcccaaagccacgaggctctga

SEQ ID NO: 120 - protein, 1144 aa, Mus musculus
MACPWKFLFKVKSYQSDLKEEKDINNNVKKTPCAVLSPTIQDDPKSHQNGSPQLLTGTAQNVPESLDKLHVTSTRPQYVRIKNWGSGEILHDTLHHKATSDFTCKSKSCLGSIMNPKSLTRGPRDKPTPLEELLPHAIEFINQYYGSFKEAKIEEHLARLEAVTKEIETTGTYQLTLDELIFATKMAWRNAPRCIGRIQWSNLQVFDARNCSTAQEMFQHICRHILYATNNGNIRSAITVFPQRSDGKHDFRLWNSQLIRYAGYQMPDGTIRGDAATLEFTQLCIDLGWKPRYGRFDVLPLVLQADGQDPEVFEIPPDLVLEVTMEHPKYEWFQELGLKWYALPAVANMLLEVGGLEFPACPFNGWYMGTEIGVRDFCDTQRYNILEEVGRRMGLETHTLASLWKDRAVTEINVAVLHSFQKQNVTIMDHHTASESFMKHMQNEYRARGGCPADWIWLVPPVSGSITPVFHQEMLNYVLSPFYYYQIEPWKTHIWQNEKLRPRRREIRFRVLVKVVFFASMLMRKVMASRVRATVLFATETGKSEALARDLATLFSYAFNTKVVCMDQYKASTLEEEQLLLVVTSTFGNGDCPSNGQTLKKSLFMLRELNHTFRYAVFGLGSSMYPQFCAFAHDIDQKLSHLGASQLAPTGEGDELSGQEDAFRSWAVQTFRAACETFDVRSKHHIQIPKRFTSNATWEPQQYRLIQSPEPLDLNRALSSIHAKNVFTMRLKSQQNLQSEKSSRTTLLVQLTFEGSRGPSYLPGEHLGIFPGNQTALVQGILERVVDCPTPHQTVCLEVLDESGSYWVKDKRLPPCSLSQALTYFLDITTPPTQLQLHKLARFATDETDRQRLEALCQPSEYNDWKFSNNPTFLEVLEEFPSLHVPAAFLLSQLPILKPRYYSISSSQDHTPSEVHLTVAVVTYRTRDGQGPLHHGVCSTWIRNLKPQDPVPCFVRSVSGFQLPEDPSQPCILIGPGTGIAPFRSFWQQRLHDSQHKGLKGGRMSLVFGCRHPEEDHLYQEEMQEMVRKRVLFQVHTGYSRLPGKPKVYVQDILQKQLANEVLSVLHGEQGHLYICGDVRMARDVATTLKKLVATKLNLSEEQVEDYFFQLKSQKRYHEDIFGAVFSYGAKKGSALEEPKATRL

SEQ ID NO: 121 - DNA, 10422 bp, Homo sapiens
  CDS (6667)..(10176)
ctgggattgggacacactttctgggcactgctggccagtcccaaaatggaacataaggaagtggttcttctacttcttttatttctgaaatcagcagcacctgagcaaagccatgtggtccaggattgctaccatggtgatggacagagttatcgaggcacgtactccaccactgtcacaggaaggacctgccaagcttggtcatctatgacaccacatcaacataataggaccacagaaaactacccaaatgctggcttgatcatgaactactgcaggaatccagatgctgtggcagctccttattgttatacgagggatcccggtgtcaggtgggagtactgcaacctgacgcaatgctcagacgcagaagggactgccgtcgcgcctccgactgttaccccggttccaagcctagaggctccttccgaacaagtgcatcctgcctgggagcaagttttccagggcagctttgagaagtcttggagaaacaaacctactaaacctgacagacagtaatactatttgcacaatgcttttctgtgggaaaggtagagccttttcactacgtattgagtacatagagtgtgagggttgacctggaacggctatcctcctggatgacgtgcgttttctgaagaactacatgttcgttgcaactcccacattagaatatgaagtcctaccgagagagatacggagactagacagatacagatgcatttgcatgtgaatacacaatcccacaatacagacgtcaaaacccataccagttattccagagagatggattgggcagaaggcagaaggagaatactctgatcgtttttcggccacgtgtgtgtgttatctcagtgtttctaagaagcgtttgctactttagattttttatttaaaaaaaatagtaataatctattaagtatgagagatgtgcagagaggattagtgatcgagagccatttttgctggtggcaatcatatggtacttttaatgggaatattagaaaggcaccggtaatgaccttgttgcagcacaaaggagagagtgtggggtgcccctgcatgttgtcccacctcttgtgacgtgtatcgttttagaatttccagtggcttgatcatgaactactgcaggaatccagatgctgtggcagctccttattgttatacgagggatcccggtgtcaggtgggagtactgcaacctgacgcaatgctcagacgcagaagggactgccgtcgcgcctccgactgttaccccggttccaagcctagaggctccttccgaacaaggtaaggagtctgtggccagacatctacacgcttcgatgctgggatgaaaagccatggaaattcccactgatgcagccgccttcaatggtaaacggatgctcgagtgttgcctgagttctaccatgtaggaggaagcctccgtgcactctctgggggagccagcggagtgatttctggtgcaacgtggttgggctttgtctttaggatgggcacaaaccctccagggggatcgacttcaaaattcaccttgttgtaaaacgggctacctcagtgtcccagccaaaatttttattgtaacatgctgtcaggtgtgtcactctttccaagccagtaagcttttccggggatttcttcaagtagccagcattcagagcaatcttcagcattgcagattctgagaaatgtggctctggagcctgtcaccctcgagaaacctaagagggctgcattgattccatgtggccctgggtctatggagcagtacatgagctcccagtgctctaaggctcttcagccctaggctttgaagggagtgatttctcagtattcttaaacctctttctgatgacacttgtacctgtgaggggtctagagagaaagagtagtagactcctactttactacaattcaggatgcagggcatgagaggattccctctctcctccaagggaagaagcttttggcgtgcacacatccctgagaagcaaagtgtctttgtcttcagtcagatacataggaccgttttctgccccatggcccggaagccaaaggccttggctttcatgatcaacggtctagggaaacatgcaaaatttccatgtctgtcccaaactctgcccccgacagccaattaccacctgcagcccgcattgccaaatgcggtgccgtttgcatgaagattcagtagagtttcctagaaaggtgctacctcgtgagctcactttccaatgaggaatctgatctggtgtgtttctctaaggtgtcaggtgaaatatttccaagaacttactacagttctagaatgggaggaatctgctgctttggtgtttgtttgttggtcggttttctcacatccatctgcctatggataaggaaaagagaacggtcgtaattctcatagactcctttctggttgtgtcacaaatggcttcacatgtttctctatgctcagagatactcagcttgatttcccgtgttttcatttcagcaccgactgagcaaaggcctggggtgcaggagtgctaccatggtaatggacagagttatcgaggcacatactccaccactgtcacaggaagaacctgccaagcttggtcatctatgacaccacactcgcatagtcggaccccagaatactacccaaatgcgtatgtctttgttctttaccataagagaagaaagggccaagtgaagtttctgttacaagagatgtgtctcaagctgagttctccgaactcaacttgtgacagatgcagatggcgtagcaaaatgtctcaggatgattgccttggagctaagggtctgagagaagggaaatgttaagctccctctccttcctcctacttctattgagcagaagggaaatctggaggtgaggagatcaccttctgaagaaagtcagaatgacaaaggaccagacacttagattacccttccacaacaccaactaaacgtcaatggagactttccagtctggaacttccgttacttctggccttccaccttccctgaagggaaggttgcgtttgccttttctctctgggttcaagaggaaagaataggtgcttatttatggacaggtgaattgatctgtttctatatctacgtatattccgattgtcagaaaaacactcgttcctaagtaccagtggcctgaagggatacaggttcccagcaagagaagatccaaggaaggaaggcagatgagagtcagcacagagagggatgctgaaaagtaaaagggatgggtggatggagagaagcccgggtctgaccacccaatggccaatattttggccacaagcgactaccagagacatggaaaaatggtttctacatgtgggacaacagatggtagaggacctagagaattgagagaggggcaatgatgggctccactccgcagatgccttggctttcttcctggatacccttcctgcactgaatagcaaggagatggagcccaagcagactgtagccatcttgctgaatggaggagagggattggagtttgggatgactgtggtagctgaaatttttctaggtctgctagaaataagaactggtttgtggaggaaaagagctctacaaatacgcatagaagtctcctccagtcgttggcctgacatgacgctgcctgtgcacaggaaatggttccacgagaaagtgtggcaaagaacatttactgagaaacagcaagtacaagagcacaggaagctcaataaagaagagagagatcacatagcactctgggatactggagttcttcccagctagaccagagagtcctcacggagcacattgccaattcagtggagaccccagaacagccgtaatttaaaggtacacttagtatattactagaataaagtcagctgcagacaaccccttgcacagctggaaagcaagtgtccaagcatcaaatcggtttccaatcaatgaagtgcctgtgagaggaaatctcaactctctttagaagtaaacaacaaagtcgattgcctcagctatgcggtatccgcagagtgagtcctaaatttaaaatctgactacatgtagaaaagcgtttcgtgtgacccatgaccaggaaataaatcgggtaatacaaacaggctcaggaatgagagaaatgattagaattgcgtgaaaatttgaaatatcagtatgataactgatttcaaatatttaaaaaaacaacatgcaagaaagcagatatcatatcaagagaaattaacagtacagaatagccaaattaaattaaagagctagtataaaaaaagtatgtcttaattgaaaaaaattactgtatggccggctgatcaatttagacgtttcagaggaaaacattacccaacacacaattctagagaacctacagaatgagctacacacacacacacacacacacacacaaactgaaaacacacccatactcacacacacgcagaaactcacaagttctaacacacacagacacgcgcacccctgaagaaacagtgaaatataaaattaagcgagcctcacagacatgtaggaaaatatgaaaagatttcctgcatgtgggaagcaagtcacagtaaagagcaagggagtttggaatagaaacaaataccagaatcaaggatggctgataacttttcaattacgaagaacattaaaaaaaatcacagaatcgtgaaactcaagggatcacatagggaatttcggaaaaaaaacccaacctgtatgatgtacttttgtacatcacagttcgaaggtaacaaggcaaagatataataagaagaaacctgtcacgagaaactggaggaaaaagagctgtgtcttcctacaagtacactgatacaaattgccaatgtgttcacctcagaaacactggaagccagataccagggaatattgttaaaatgataatcaggaacaaaaagagatcaaccgggaatgctgaatccagcaataaaatgccttgaagatcatccatgtcggataaatgcatattgtgcactgccccaaagaaagaaaccggaaactgtaagaattggaaatcagcaggcttatgtaacaagagaggtgacccgaaggaattaggtagaagaagaattaacaagaaaggaactttctgcagcccacgtaatgaagaatccagcaattggcaaatgtagatagatgtaaatgcaaaatattttcttgatcaaatttctatatctttgtaaatgagagttgactacttgaaacaaaatgatagcaagatatttaacttcagcatatgtagaggtaagaatttgaaatggtagcataaatcacgaagggattaattcgaagtgtaccgttgtaagtttctttacctcatgcacgatggtgtgtcatattaataaaagggtactgtgcgggttcgaagggatattgcaaatcctagagcaatcacaaaggtttgaactctgaggtttttggtataataagaatagtccatgcattcaaaagagggaagccaaggaagaactagaagtctttcaagagctcaggctcttatacatccagttgctcattgaaccagcttcctggaatggagggtctggggttgagactaggccacaagtctagagtctctagagagacagtgttggaaccccatggcccataatacatttcccattttctcaggcagccagaggtcatgaatgtgaggatactgggaggttggagcaacgttcttgggaggcataaggaagagcgaatgcttcaagatccccgcagcccaaactactcgcctgctttgccccctaatgcatttttctctgctgctccgtagctgtccgacctcttcagatctcttagtccaccctgccgtcttcctttatgccatgggtcccactgttctttcaactcatccccctttccctcagtcccggagtagctgcggccagcagagggtagactgagagcaggagagaaggacctgcctaggaaccccttctagagatactgcatcctgcctgggagcaagttttccagggcagctttgagaagtcttggagaaacaaacctactaaacctgacagacagtaatactatttgcacaatgcttttctgtgggaaaggtagagccttttcactacgtattgagtacatagagtgtgagggttgacctggaacggctatcctcctggatgacgtgtgttttctgaagaactacatgttcgttgcaactcccacattagaatatgaagtcctaccgagagagatacggagactagacagatacagatgcatttgcatgtgaatacacaatcccacaatacagacgtcaaaacccataccagttattccagagagatggattgggcagaaggcagaaggagaatactctgatcgtttttcggccacgtgtgtgtgttatctcagtgtttctaagaagcgtttgctactttagattttttatttaaaaaaaatagtaataatctattaagtatgagagatgtgcagagaggattagtgatcgagagccatttttgctggtggcaatcatatggtacttttaatgggaatattagaaaggcaccggtaatgaccttgttgcagcacaaaggagagagtgtggggtgcccctgcatgttgtcccacctcttgtgacgtgtatcgttttggaatttccagtggcttgatcatgaactactgcaggaatccagatgctgtggcagctccttattgttatacgagggatcccggtgtcaggtgggagtactgcaacctgacgcaatgctcagacgcagaagggactgccgtcgcgcctccgactgttaccccggttccaagcctagaggctccttccgaacaagcaccaactgagcaaaggcctggggtgcaggagtgctaccacggaaatggacagagttatcaaggcacatacttcattactgtcacaggaagaacctgccaagcttggtcatctatgacaccacactcgcatagtcggaccccagcatactacccaaatgctggcttgatcaagaactactgccgaaatccagatcctgtggcagccccttggtgttatacaacagatcccagtgtcaggtgggagtactgcaacctgacacgatgctcagatgcagaatggactgccttcgtccctccgaatgttattctggctccaagcctagaggctttttttgaacaagcactgactgaggaaacccccggggtacaggactgctactaccattatggacagagttaccgaggcacatactccaccactgtcacaggaagaacttgccaagcttggtcatctatgacaccacaccagcatagtcggaccccagaaaactacccaaatgctggcctgaccaggaactactgcaggaatccagatgctgagattcgcccttggtgttacaccatggatcccagtgtcaggtgggagtactgcaacctgacacaatgcctggtgacagaatcaagtgtccttgcaactctcacggtggtcccagatccaagcacagaggcttcttctgaagaagcaccaacggagcaaagccccggggtccaggattgctaccatggtgatggacagagttatcgaggctcattctctaccactgtcacaggaaggacatgtcagtcttggtcctctatgacaccacactggcatcagaggacaacagaatattatccaaatggtggcctgaccaggaactactgcaggaatccagatgctgagattagtccttggtgttataccatggatcccaatgtcagatgggagtactgcaacctgacacaatgtccagtgacagaatcaagtgtccttgcgacgtccacggctgtttctgaacaagcaccaacggagcaaagccccacagtccaggactgctaccatggtgatggacagagttatcgaggctcattctccaccactgttacaggaaggacatgtcagtcttggtcctctatgacaccacactggcatcagagaaccacagaatactacccaaatggtggcctgaccaggaactactgcaggaatccagatgctgagattcgcccttggtgttataccatggatcccagtgtcagatgggagtactgcaacctgacgcaatgtccagtgatggaatcaactctcctcacaactcccacggtggtcccagttccaagcacagagcttccttctgaagaagcaccaactgaaaacagcactggggtccaggactgctaccgaggtgatggacagagttatcgaggcacactctccaccactatcacaggaagaacatgtcagtcttggtcgtctatgacaccacattggcatcggaggatcccattatactatccaaatgctggcctgaccaggaactactgcaggaatccagatgctgagattcgcccttggtgttacaccatggatcccagtgtcaggtgggagtactgcaacctgacacgatgtccagtgacagaatcgagtgtcctcacaactcccacagtggccccggttccaagcacagaggctccttctgaacaagcaccacctgagaaaagccctgtggtccaggattgctaccatggtgatggacggagttatcgaggcatatcctccaccactgtcacaggaaggacctgtcaatcttggtcatctatgataccacactggcatcagaggaccccagaaaactacccaaatgctggcctgaccgagaactactgcaggaatccagattctgggaaacaaccctggtgttacacaaccgatccgtgtgtgaggtgggagtactgcaatctgacacaatgctcagaaacagaatcaggtgtcctagagactcccactgttgttccagttccaagcatggaggctcattctgaagcagcaccaactgagcaaacccctgtggtccggcagtgctaccatggtaatggccagagttatcgaggcacattctccaccactgtcacaggaaggacatgtcaatcttggtcatccatgacaccacaccggcatcagaggaccccagaaaactacccaaatgatggcctgacaatgaactactgcaggaatccagatgccgatacaggcccttggtgttttaccatggaccccagcatcaggtgggagtactgcaacctgacgcgatgctcagacacagaagggactgtggtcgctcctccgactgtcatccaggttccaagcctagggcctccttctgaacaagactgtatgtttgggaatgggaaaggataccggggcaagaaggcaaccactgttactgggacgccatgccaggaatgggctgcccaggagccccatagacacagcacgttcattccagggacaaataaatgggcaggtctggaaaaaaattactgccgtaaccctgatggtgacatcaatggtccctggtgctacacaatgaatccaagaaaactttttgactactgtgatatccctctctgtgcatcctcttcatttgattgtgggaagcctcaagtggagccgaagaaatgtcctggaagcattgtaggggggtgtgtggcccacccacattcctggccctggcaagtcagtctcagaacaaggtttggaaagcacttctgtggaggcaccttaatatccccagagtgggtgctgactgctgctcactgcttgaagaagtcctcaaggccttcatcctacaaggtcatcctgggtgcacaccaagaagtgaacctcgaatctcatgttcaggaaatagaagtgtctaggctgttcttggagcccacacaagcagatattgccttgctaaagctaagcaggcctgccgtcatcactgacaaagtaatgccagcttgtctgccatccccagactacatggtcaccgccaggactgaatgttacatcactggctggggagaaacccaaggtacctttgggactggccttctcaaggaagcccagctccttgttattgagaatgaagtgtgcaatcactataagtatatttgtgctgagcatttggccagaggcactgacagttgccagggtgacagtggagggcctctggtttgcttcgagaaggacaaatacattttacaaggagtcacttcttggggtcttggctgtgcacgccccaataagcctggtgtctatgctcgtgtttcaaggtttgttacttggattgagggaatgatgagaaataattaattggacgggagacagagtgaagcatcaacctacttagaagctgaaacgtgggtaaggatttagcatgctggaaataatagacagcaatcaaacgaagacactgttcccagctaccagctatgccaaaccttggcatttttggtatttttgtgtataagcttttaaggtctgactgacaaattctgtattaaggtgtcatagctatgacatttgttaaaaataaactctgcacttattttgatttga

SEQ ID NO: 122 - protein, 1169 aa, Homo sapiens
MNYCRNPDAVAAPYCYTRDPGVRWEYCNLTQCSDAEGTAVAPPTVTPVPSLEAPSEQAPTEQRPGVQECYHGNGQSYQGTYFITVTGRTCQAWSSMTPHSHSRTPAYYPNAGLIKNYCRNPDPVAAPWCYTTDPSVRWEYCNLTRCSDAEWTAFVPPNVILAPSLEAFFEQALTEETPGVQDCYYHYGQSYRGTYSTTVTGRTCQAWSSMTPHQHSRTPENYPNAGLTRNYCRNPDAEIRPWCYTMDPSVRWEYCNLTQCLVTESSVLATLTVVPDPSTEASSEEAPTEQSPGVQDCYHGDGQSYRGSFSTTVTGRTCQSWSSMTPHWHQRTTEYYPNGGLTRNYCRNPDAEISPWCYTMDPNVRWEYCNLTQCPVTESSVLATSTAVSEQAPTEQSPTVQDCYHGDGQSYRGSFSTTVTGRTCQSWSSMTPHWHQRTTEYYPNGGLTRNYCRNPDAEIRPWCYTMDPSVRWEYCNLTQCPVMESTLLTTPTVVPVPSTELPSEEAPTENSTGVQDCYRGDGQSYRGTLSTTITGRTCQSWSSMTPHWHRRIPLYYPNAGLTRNYCRNPDAEIRPWCYTMDPSVRWEYCNLTRCPVTESSVLTTPTVAPVPSTEAPSEQAPPEKSPVVQDCYHGDGRSYRGISSTTVTGRTCQSWSSMIPHWHQRTPENYPNAGLTENYCRNPDSGKQPWCYTTDPCVRWEYCNLTQCSETESGVLETPTVVPVPSMEAHSEAAPTEQTPVVRQCYHGNGQSYRGTFSTTVTGRTCQSWSSMTPHRHQRTPENYPNDGLTMNYCRNPDADTGPWCFTMDPSIRWEYCNLTRCSDTEGTVVAPPTVIQVPSLGPPSEQDCMFGNGKGYRGKKATTVTGTPCQEWAAQEPHRHSTFIPGTNKWAGLEKNYCRNPDGDINGPWCYTMNPRKLFDYCDIPLCASSSFDCGKPQVEPKKCPGSIVGGCVAHPHSWPWQVSLRTRFGKHFCGGTLISPEWVLTAAHCLKKSSRPSSYKVILGAHQEVNLESHVQEIEVSRLFLEPTQADIALLKLSRPAVITDKVMPACLPSPDYMVTARTECYITGWGETQGTFGTGLLKEAQLLVIENEVCNHYKYICAEHLARGTDSCQGDSGGPLVCFEKDKYILQGVTSWGLGCARPNKPGVYARVSRFVTWIEGMMRNN

SEQ ID NO: 123 - DNA, 14070 bp, Homo sapiens
  CDS (79)..(13770)
gaggagcccgcccagccagccagggccgcgaggccgaggccaggccgcagcccaggagccgccccaccgcagctggcgatggacccgccgaggcccgcgctgctggcgctgctggcgctgcctgcgctgctgctgctgctgctggcgggcgccagggccgaagaggaaatgctggaaaatgtcagcctggtctgtccaaaagatgcgacccgattcaagcacctccggaagtacacatacaactatgaggctgagagttccagtggagtccctgggactgctgattcaagaagtgccaccaggatcaactgcaaggttgagctggaggttccccagctctgcagcttcatcctgaagaccagccagtgcatcctgaaagaggtgtatggcttcaaccctgagggcaaagccttgctgaagaaaaccaagaactctgaggagtttgctgcagccatgtccaggtatgagctcaagctggccattccagaagggaagcaggttttcctttacccggagaaagatgaacctacttacatcctgaacatcaagaggggcatcatttctgccctcctggttcccccagagacagaagaagccaagcaagtgttgtttctggataccgtgtatggaaactgctccactcactttaccgtcaagacgaggaagggcaatgtggcaacagaaatatccactgaaagagacctggggcagtgtgatcgcttcaagcccatccgcacaggcatcagcccacttgctctcatcaaaggcatgacccgccccttgtcaactctgatcagcagcagccagtcctgtcagtacacactggacgctaagaggaagcatgtggcagaagccatctgcaaggagcaacacctcttcctgcctttctcctacaagaataagtatgggatggtagcacaagtgacacagactttgaaacttgaagacacaccaaagatcaacagccgcttctttggtgaaggtactaagaagatgggcctcgcatttgagagcaccaaatccacatcacctccaaagcaggccgaagctgttttgaagactgtccaggaactgaaaaaactaaccatctctgagcaaaatatccagagagctaatctcttcaataagctggttactgagctgagaggcctcagtgatgaagcagtcacatctctcttgccacagctgattgaggtgtccagccccatcactttacaagccttggttcagtgtggacagcctcagtgctccactcacatcctccagtggctgaaacgtgtgcatgccaacccccttctgatagatgtggtcacctacctggtggccctgatccccgagccctcagcacagcagctgcgagagatcttcaacatggcgagggatcagcgcagccgagccaccttgtatgcgctgagccacgcggtcaacaactatcataagacaaaccctacagggacccaggagctgctggacattgctaattacctgatggaacagattcaagatgactgcactggggatgaagattacacctatttgattctgcgggtcattggaaatatgggccaaaccatggagcagttaactccagaactcaagtcttcaatcctgaaatgtgtccaaagtacaaagccatcactgatgatccagaaagctgccatccaggctctgcggaaaatggagcctaaagacaaggaccaggaggttcttcttcagactttccttgatgatgcttctccgggagataagcgactggctgcctatcttatgttgatgaggagtccttcacaggcagatattaacaaaattgtccaaattctaccatgggaacagaatgagcaagtgaagaactttgtggcttcccatattgccaatatcttgaactcagaagaattggatatccaagatctgaaaaagttagtgaaagaagttctgaaagaatctcaacttccaactgtcatggacttcagaaaattctctcggaactatcaactctacaaatctgtttctattccatcacttgacccagcctcagccaaaatagaagggaatcttatatttgatccaaataactaccttcctaaagaaagcatgctgaaaactaccctcactgcctttggatttgcttcagctgacctcatcgagattggcttggaaggaaaaggctttgagccaacattggaagctctttttgggaagcaaggatttttcccagacagtgtcaacaaagctttgtactgggttaatggtcaagttcctgatggtgtctctaaggtcttagtggaccactttggctataccaaagatgataaacatgagcaggatatggtaaatggaataatgctcagtgttgagaagctgattaaagatttgaaatccaaagaagtcccggaagccagagcctacctccgcatcttgggagaggagcttggttttgccagtctccatgacctccagctcctgggaaagctgcttctgatgggtgcccgcactctgcaggggatcccccagatgattggagaggtcatcaggaagggctcaaagaatgacttttttcttcactacatcttcatggagaatgcctttgaactccccactggagctggattacagttgcaaatatcttcatctggagtcattgctcccggagccaaggctggagtaaaactggaagtagccaacatgcaggctgaactggtggcaaaaccctccgtgtctgtggagtttgtgacaaatatgggcatcatcattccggacttcgctaggagtggggtccagatgaacaccaacttcttccacgagtcgggtctggaggctcatgttgccctaaaacctgggaagctgaagtttatcattccttccccaaagagaccagtcaagctgctcagtggaggcaacacattacatttggtctctaccaccaaaacggaggtgatcccacctctcattgagaacaggcagtcctggtcagtttgcaagcaagtctttcctggcctgaattactgcacctcaggcgcttactccaacgccagctccacagactccgcctcctactatccgctgaccggggacaccagattagagctggaactgaggcctacaggagagattgagcagtattctgtcagcgcaacctatgagctccagagagaggacagagccttggtggataccctgaagtttgtaactcaagcagaaggtgcgaagcagactgaggctaccatgacattcaaatataatcggcagagtatgaccttgtccagtgaagtccaaattccggattttgatgttgacctcggaacaatcctcagagttaatgatgaatctactgagggcaaaacgtcttacagactcaccctggacattcagaacaagaaaattactgaggtcgccctcatgggccacctaagttgtgacacaaaggaagaaagaaaaatcaagggtgttatttccataccccgtttgcaagcagaagccagaagtgagatcctcgcccactggtcgcctgccaaactgcttctccaaatggactcatctgctacagcttatggctccacagtttccaagagggtggcatggcattatgatgaagagaagattgaatttgaatggaacacaggcaccaatgtagataccaaaaaaatgacttccaatttccctgtggatctctccgattatcctaagagcttgcatatgtatgctaatagactcctggatcacagagtccctcaaacagacatgactttccggcacgtgggttccaaattaatagttgcaatgagctcatggcttcagaaggcatctgggagtcttccttatacccagactttgcaagaccacctcaatagcctgaaggagttcaacctccagaacatgggattgccagacttccacatcccagaaaacctcttcttaaaaagcgatggccgggtcaaatataccttgaacaagaacagtttgaaaattgagattcctttgccttttggtggcaaatcctccagagatctaaagatgttagagactgttaggacaccagccctccacttcaagtctgtgggattccatctgccatctcgagagttccaagtccctacttttaccattcccaagttgtatcaactgcaagtgcctctcctgggtgttctagacctctccacgaatgtctacagcaacttgtacaactggtccgcctcctacagtggtggcaacaccagcacagaccatttcagccttcgggctcgttaccacatgaaggctgactctgtggttgacctgctttcctacaatgtgcaaggatctggagaaacaacatatgaccacaagaatacgttcacactatcatgtgatgggtctctacgccacaaatttctagattcgaatatcaaattcagtcatgtagaaaaacttggaaacaacccagtctcaaaaggtttactaatattcgatgcatctagttcctggggaccacagatgtctgcttcagttcatttggactccaaaaagaaacagcatttgtttgtcaaagaagtcaagattgatgggcagttcagagtctcttcgttctatgctaaaggcacatatggcctgtcttgtcagagggatcctaacactggccggctcaatggagagtccaacctgaggtttaactcctcctacctccaaggcaccaaccagataacaggaagatatgaagatggaaccctctccctcacctccacctctgatctgcaaagtggcatcattaaaaatactgcttccctaaagtatgagaactacgagctgactttaaaatctgacaccaatgggaagtataagaactttgccacttctaacaagatggatatgaccttctctaagcaaaatgcactgctgcgttctgaatatcaggctgattacgagtcattgaggttcttcagcctgctttctggatcactaaattcccatggtcttgagttaaatgctgacatcttaggcactgacaaaattaatagtggtgctcacaaggcgacactaaggattggccaagatggaatatctaccagtgcaacgaccaacttgaagtgtagtctcctggtgctggagaatgagctgaatgcagagcttggcctctctggggcatctatgaaattaacaacaaatggccgcttcagggaacacaatgcaaaattcagtctggatgggaaagccgccctcacagagctatcactgggaagtgcttatcaggccatgattctgggtgtcgacagcaaaaacattttcaacttcaaggtcagtcaagaaggacttaagctctcaaatgacatgatgggctcatatgctgaaatgaaatttgaccacacaaacagtctgaacattgcaggcttatcactggacttctcttcaaaacttgacaacatttacagctctgacaagttttataagcaaactgttaatttacagctacagccctattctctggtaactactttaaacagtgacctgaaatacaatgctctggatctcaccaacaatgggaaactacggctagaacccctgaagctgcatgtggctggtaacctaaaaggagcctaccaaaataatgaaataaaacacatctatgccatctcttctgctgccttatcagcaagctataaagcagacactgttgctaaggttcagggtgtggagtttagccatcggctcaacacagacatcgctgggctggcttcagccattgacatgagcacaaactataattcagactcactgcatttcagcaatgtcttccgttctgtaatggccccgtttaccatgaccatcgatgcacatacaaatggcaatgggaaactcgctctctggggagaacatactgggcagctgtatagcaaattcctgttgaaagcagaacctctggcatttactttctctcatgattacaaaggctccacaagtcatcatctcgtgtctaggaaaagcatcagtgcagctcttgaacacaaagtcagtgccctgcttactccagctgagcagacaggcacctggaaactcaagacccaatttaacaacaatgaatacagccaggacttggatgcttacaacactaaagataaaattggcgtggagcttactggacgaactctggctgacctaactctactagactccccaattaaagtgccacttttactcagtgagcccatcaatatcattgatgctttagagatgagagatgccgttgagaagccccaagaatttacaattgttgcttttgtaaagtatgataaaaaccaagatgttcactccattaacctcccattttttgagaccttgcaagaatattttgagaggaatcgacaaaccattatagttgtactggaaaacgtacagagaaacctgaagcacatcaatattgatcaatttgtaagaaaatacagagcagccctgggaaaactcccacagcaagctaatgattatctgaattcattcaattgggagagacaagtttcacatgccaaggagaaactgactgctctcacaaaaaagtatagaattacagaaaatgatatacaaattgcattagatgatgccaaaatcaactttaatgaaaaactatctcaactgcagacatatatgatacaatttgatcagtatattaaagatagttatgatttacatgatttgaaaatagctattgctaatattattgatgaaatcattgaaaaattaaaaagtcttgatgagcactatcatatccgtgtaaatttagtaaaaacaatccatgatctacatttgtttattgaaaatattgattttaacaaaagtggaagtagtactgcatcctggattcaaaatgtggatactaagtaccaaatcagaatccagatacaagaaaaactgcagcagcttaagagacacatacagaatatagacatccagcacctagctggaaagttaaaacaacacattgaggctattgatgttagagtgcttttagatcaattgggaactacaatttcatttgaaagaataaatgatgttcttgagcatgtcaaacactttgttataaatcttattggggattttgaagtagctgagaaaatcaatgccttcagagccaaagtccatgagttaatcgagaggtatgaagtagaccaacaaatccaggttttaatggataaattagtagagttggcccaccaatacaagttgaaggagactattcagaagctaagcaatgtcctacaacaagttaagataaaagattactttgagaaattggttggatttattgatgatgctgtcaagaagcttaatgaattatcttttaaaacattcattgaagatgttaacaaattccttgacatgttgataaagaaattaaagtcatttgattaccaccagtttgtagatgaaaccaatgacaaaatccgtgaggtgactcagagactcaatggtgaaattcaggctctggaactaccacaaaaagctgaagcattaaaactgtttttagaggaaaccaaggccacagttgcagtgtatctggaaagcctacaggacaccaaaataaccttaatcatcaattggttacaggaggctttaagttcagcatctttggctcacatgaaggccaaattccgagagactctagaagatacacgagaccgaatgtatcaaatggacattcagcaggaacttcaacgatacctgtctctggtaggccaggtttatagcacacttgtcacctacatttctgattggtggactcttgctgctaagaaccttactgactttgcagagcaatattctatccaagattgggctaaacgtatgaaagcattggtagagcaagggttcactgttcctgaaatcaagaccatccttgggaccatgcctgcctttgaagtcagtcttcaggctcttcagaaagctaccttccagacacctgattttatagtccccctaacagatttgaggattccatcagttcagataaacttcaaagacttaaaaaatataaaaatcccatccaggttttccacaccagaatttaccatccttaacaccttccacattccttcctttacaattgactttgtagaaatgaaagtaaagatcatcagaaccattgaccagatgctgaacagtgagctgcagtggcccgttccagatatatatctcagggatctgaaggtggaggacattcctctagcgagaatcaccctgccagacttccgtttaccagaaatcgcaattccagaattcataatcccaactctcaaccttaatgattttcaagttcctgaccttcacataccagaattccagcttccccacatctcacacacaattgaagtacctacttttggcaagctatacagtattctgaaaatccaatctcctcttttcacattagatgcaaatgctgacatagggaatggaaccacctcagcaaacgaagcaggtatcgcagcttccatcactgccaaaggagagtccaaattagaagttctcaattttgattttcaagcaaatgcacaactctcaaaccctaagattaatccgctggctctgaaggagtcagtgaagttctccagcaagtacctgagaacggagcatgggagtgaaatgctgttttttggaaatgctattgagggaaaatcaaacacagtggcaagtttacacacagaaaaaaatacactggagcttagtaatggagtgattgtcaagataaacaatcagcttaccctggatagcaacactaaatacttccacaaattgaacatccccaaactggacttctctagtcaggctgacctgcgcaacgagatcaagacactgttgaaagctggccacatagcatggacttcttctggaaaagggtcatggaaatgggcctgccccagattctcagatgagggaacacatgaatcacaaattagtttcaccatagaaggacccctcacttcctttggactgtccaataagatcaatagcaaacacctaagagtaaaccaaaacttggtttatgaatctggctccctcaacttttctaaacttgaaattcaatcacaagtcgattcccagcatgtgggccacagtgttctaactgctaaaggcatggcactgtttggagaagggaaggcagagtttactgggaggcatgatgctcatttaaatggaaaggttattggaactttgaaaaattctcttttcttttcagcccagccatttgagatcacggcatccacaaacaatgaagggaatttgaaagttcgttttccattaaggttaacagggaagatagacttcctgaataactatgcactgtttctgagtcccagtgcccagcaagcaagttggcaagtaagtgctaggttcaatcagtataagtacaaccaaaatttctctgctggaaacaacgagaacattatggaggcccatgtaggaataaatggagaagcaaatctggatttcttaaacattcctttaacaattcctgaaatgcgtctaccttacacaataatcacaactcctccactgaaagatttctctctatgggaaaaaacaggcttgaaggaattcttgaaaacgacaaagcaatcatttgatttaagtgtaaaagctcagtataagaaaaacaaacacaggcattccatcacaaatcctttggctgtgctttgtgagtttatcagtcagagcatcaaatcctttgacaggcattttgaaaaaaacagaaacaatgcattagattttgtcaccaaatcctataatgaaacaaaaattaagtttgataagtacaaagctgaaaaatctcacgacgagctccccaggacctttcaaattcctggatacactgttccagttgtcaatgttgaagtgtctccattcaccatagagatgtcggcattcggctatgtgttcccaaaagcagtcagcatgcctagtttctccatcctaggttctgacgtccgtgtgccttcatacacattaatcctgccatcattagagctgccagtccttcatgtccctagaaatctcaagctttctcttccagatttcaaggaattgtgtaccataagccatatttttattcctgccatgggcaatattacctatgatttctcctttaaatcaagtgtcatcacactgaataccaatgctgaactttttaaccagtcagatattgttgctcatctcctttcttcatcttcatctgtcattgatgcactgcagtacaaattagagggcaccacaagattgacaagaaaaaggggattgaagttagccacagctctgtctctgagcaacaaatttgtggagggtagtcataacagtactgtgagcttaaccacgaaaaatatggaagtgtcagtggcaacaaccacaaaagcccaaattccaattttgagaatgaatttcaagcaagaacttaatggaaataccaagtcaaaacctactgtctcttcctccatggaatttaagtatgatttcaattcttcaatgctgtactctaccgctaaaggagcagttgaccacaagcttagcttggaaagcctcacctcttacttttccattgagtcatctaccaaaggagatgtcaagggttcggttctttctcgggaatattcaggaactattgctagtgaggccaacacttacttgaattccaagagcacacggtcttcagtgaagctgcagggcacttccaaaattgatgatatctggaaccttgaagtaaaagaaaattttgctggagaagccacactccaacgcatatattccctctgggagcacagtacgaaaaaccacttacagctagagggcctctttttcaccaacggagaacatacaagcaaagccaccctggaactctctccatggcaaatgtcagctcttgttcaggtccatgcaagtcagcccagttccttccatgatttccctgaccttggccaggaagtggccctgaatgctaacactaagaaccagaagatcagatggaaaaatgaagtccggattcattctgggtctttccagagccaggtcgagctttccaatgaccaagaaaaggcacaccttgacattgcaggatccttagaaggacacctaaggttcctcaaaaatatcatcctaccagtctatgacaagagcttatgggatttcctaaagctggatgtaaccaccagcattggtaggagacagcatcttcgtgtttcaactgcctttgtgtacaccaaaaaccccaatggctattcattctccatccctgtaaaagttttggctgataaattcattattcctgggctgaaactaaatgatctaaattcagttcttgtcatgcctacgttccatgtcccatttacagatcttcaggttccatcgtgcaaacttgacttcagagaaatacaaatctataagaagctgagaacttcatcatttgccctcaacctaccaacactccccgaggtaaaattccctgaagttgatgtgttaacaaaatattctcaaccagaagactccttgattcccttttttgagataaccgtgcctgaatctcagttaactgtgtcccagttcacgcttccaaaaagtgtttcagatggcattgctgctttggatctaaatgcagtagccaacaagatcgcagactttgagttgcccaccatcatcgtgcctgagcagaccattgagattccctccattaagttctctgtacctgctggaattgccattccttcctttcaagcactgactgcacgctttgaggtagactctcccgtgtataatgccacttggagtgccagtttgaaaaacaaagcagattatgttgaaacagtcctggattccacatgcagctcaaccgtacagttcctagaatatgaacttaatgttttgggaacacacaaaatcgaagatggtacgttagcctctaagactaaaggaacatttgcacaccgtgacttcagtgcagaatatgaagaagatggcaaatatgaaggacttcaggaatgggaaggaaaagcgcacctcaatatcaaaagcccagcgttcaccgatctccatctgcgctaccagaaagacaagaaaggcatctccacctcagcagcctccccagccgtaggcaccgtgggcatggatatggatgaagatgacgacttttctaaatggaacttctactacagccctcagtcctctccagataaaaaactcaccatattcaaaactgagttgagggtccgggaatctgatgaggaaactcagatcaaagttaattgggaagaagaggcagcttctggcttgctaacctctctgaaagacaacgtgcccaaggccacaggggtcctttatgattatgtcaacaagtaccactgggaacacacagggctcaccctgagagaagtgtcttcaaagctgagaagaaatctgcaggaccatgctgagtgggtttatcaaggggccattagggaaattgatgatatcgacgagaggttccagaaaggagccagtgggaccactgggacctaccaagagtggaaggacaaggcccagaatctgtaccaggaactgttgactcaggaaggccaagccagtttccagggactcaaggataacgtgtttgatggcttggtacgagttactcaagaattccatatgaaagtcaagcatctgattgactcactcattgattttctgaacttccccagattccagtttccggggaaacctgggatatacactagggaggaactttgcactatgttcataagggaggtagggacggtactgtcccaggtatattcgaaagtccataatggttcagaaatactgttttcctatttccaagacctagtgattacacttcctttcgagttaaggaaacataaactaatagatgtaatctcgatgtatagggaactgttgaaagatttatcaaaagaagcccaagaggtatttaaagccattcagtctctcaagaccacagaggtgctacgtaatcttcaggaccttttacaattcattttccaactaatagaagataacattaaacagctgaaagagatgaaatttacttatcttattaattatatccaagatgagatcaacacaatcttcaatgattatatcccatatgtttttaaattgttgaaagaaaacctatgccttaatcttcataagttcaatgaatttattcaaaacgagcttcaggaagcttctcaagagttacagcagatccatcaatacattatggcccttcgtgaagaatattttgatccaagtatagttggctggacagtgaaatattatgaacttgaagaaaagatagtcagtctgatcaagaacctgttagttgctcttaaggacttccattctgaatatattgtcagtgcctctaactttacttcccaactctcaagtcaagttgagcaatttctgcacagaaatattcaggaatatcttagcatccttaccgatccagatggaaaagggaaagagaagattgcagagctttctgccactgctcaggaaataattaaaagccaggccattgcgacgaagaaaataatttctgattaccaccagcagtttagatataaactgcaagatttttcagaccaactctctgattactatgaaaaatttattgctgaatccaaaagattgattgacctgtccattcaaaactaccacacatttctgatatacatcacggagttactgaaaaagctgcaatcaaccacagtcatgaacccctacatgaagcttgctccaggagaacttactatcatcctctaattttttaaaagaaatcttcatttattcttcttttccaattgaactttcacatagcacagaaaaaattcaaaatgcctatattgatcaaaccatacagtgagccagccttgcagtaggcagtagactataagcagaagcacatatgaactggacctgcaccaaagctggcaccagggctcggaaggtctctgaactcagaaggatggcattttttgcaagttaaagaaaatcaggatctgagttattttgctaaacttgggggaggaggaacaaataaatggagtctttattgtgtatcat

SEQ ID NO: 124 - protein, 4563 aa, Homo sapiens [sequence omitted]

SEQ ID NO: 125 - DNA, 1156 bp, Homo sapiens
  CDS (61)..(1014)
cgcagcggaggtgaaggacgtccttccccaggagccgactggccaatcacaggcaggaagatgaaggttctgtgggctgcgttgctggtcacattcctggcaggatgccaggccaaggtggagcaagcggtggagacagagccggagcccgagctgcgccagcagaccgagtggcagagcggccagcgctgggaactggcactgggtcgcttttgggattacctgcgctgggtgcagacactgtctgagcaggtgcaggaggagctgctcagctcccaggtcacccaggaactgagggcgctgatggacgagaccatgaaggagttgaaggcctacaaatcggaactggaggaacaactgaccccggtggcggaggagacgcgggcacggctgtccaaggagctgcaggcggcgcaggcccggctgggcgcggacatggaggacgtgtgcggccgcctggtgcagtaccgcggcgaggtgcaggccatgctcggccagagcaccgaggagctgcgggtgcgcctcgcctcccacctgcgcaagctgcgtaagcggctcctccgcgatgccgatgacctgcagaagcgcctggcagtgtaccaggccggggcccgcgagggcgccgagcgcggcctcagcgccatccgcgagcgcctggggcccctggtggaacagggccgcgtgcgggccgccactgtgggctccctggccggccagccgctacaggagcgggcccaggcctggggcgagcggctgcgcgcgcggatggaggagatgggcagccggacccgcgaccgcctggacgaggtgaaggagcaggtggcggaggtgcgcgccaagctggaggagcaggcccagcagatacgcctgcaggccgaggccttccaggcccgcctcaagagctggttcgagcccctggtggaagacatgcagcgccagtgggccgggctggtggagaaggtgcaggctgccgtgggcaccagcgccgcccctgtgcccagcgacaatcactgaacgccgaagcctgcagccatgcgaccccacgccaccccgtgcctcctgcctccgcgcagcctgcagcgggagaccctgtccccgccccagccgtcctcctggggtggaccctagtttaataaagattcaccaagtttcacgc

SEQ ID NO: 126 - protein, 317 aa, Homo sapiens [sequence omitted]

SEQ ID NO: 127 - DNA, 542 bp, Homo sapiens
  CDS (3)..(542)
ctctgggcgacgttgctggcagaggaaatgagaagaagcccagtagcgtgagggctctgtccattgtcctccccatcgccacggagctgggtctctggtctcgggggcagctgtgtgacagagcgtgcctctccctacggtgctcctcgtcttcctttgcctgggggtcttccttctatggaagaactggcggcttaagaacatcaacagcatcaactttgacaaccccgtctatcagaagaccacagaggatgaggtccacatttgccacaaccaggacggctacagctacccctcgagacagatggtcagtctggaggatgacgtggcgtgaacatctgcctggagtcccgcccctgcccagaacccttcctgagacctcgccggccttgttttattcaaagacagagaagaccaaagcattgcctgccagagctttgttttatatatttattcatctgggaggcagaacaggcttcggacagtgcccatgcaatggcttgggttgggattttggtttcttcctttcctgtgaaggataa

SEQ ID NO: 128 - protein, 179 aa, Homo sapiens
LGDVAGRGNEKKPSSVRALSIVLPIATELGLWSRGQLCDRACLSLRCSSSSFAWGSSFYGRTGGLRTSTASTLTTPSIRRPQRMRSTFATTRTATATPRDRWSVWRMTWREHLPGVPPLPRTLPETSPALFYSKTEKTKALPARALFYIFIHLGGRTGFGQCPCNGLGWDFGFFLSCEG

SEQ ID NO: 129 - DNA, 3408 bp, Homo sapiens
  CDS (27)..(2519)
cgagcgctcccaccgagctgcctgccatggggctggggctgctgctcccgctgctgctgctctggactcgggggactcaggggtccgagctggaccccaaagggcagcacgtctgtgtggccagcagcccctctgctgagctgcagtgctgcgcaggctggaggcagaaggatcaagaatgcaccatccccatctgtgaggggccggacgcctgccagaaagacgaggtgtgtgtgaagccgggcctctgtcgatgcaagcctggattctttggggcccactgcagctcccgctgcccgggccagtactggggccccgactgccgtgagagctgcccctgccacccgcacggccagtgcgagccagccacgggcgcgtgccagtgccaggccgaccgctggggagcccgctgcgagttcccgtgcgcctgcggcccccacgggcgctgcgaccccgcgaccggcgtgtgccactgcgaacccggctggtggtcgtccacgtgccgccgcccgtgccagtgcaacaccgcggcggcgcgctgcgagcaggccacgggcgcctgcgtgtgcaagccgggctggtgggggcgccgctgcagcttccgctgcaactgccacggctccccgtgcgagcaggactccggccgctgcgcctgccggccgggctggtggggtcccgaatgccagcagcagtgcgagtgtgtgcggggccgctgcagcgccgcctccggcgagtgcacctgcccgcccggcttccgcggagcgcgctgcgagctgccctgcccggcaggcagccacggggtgcagtgcgcacacagctgtggccgctgcaaacacaatgagccgtgctctccagacacaggcagctgtgagtcctgcgagccgggctggaacgggacccagtgccagcagccctgcctgcctggcacctttggcgagagctgcgaacagcagtgccctcactgccgacatggggaggcctgtgagccagatactggccactgtcagcgctgtgaccctggctggctggggcccaggtgtgaagacccctgccccactggtacctttggggaagactgtggctctacctgccccacctgtgttcaggggtcctgtgatactgtgacaggggactgtgtctgcagtgccggctactgggggcccagctgcaacgcctcctgcccagccggtttccatggaaacaactgctcagttccttgtgaatgcccagagggactctgccaccctgtctctgggtcctgccagccaggctctggcagtcgggacactgccctcatcgtgggcagccttgtgcctctgctgctgctcttcctgggtcttgcctgctgtgcctgctgctgctgggccccccgatcagacctcaaggacaggccagcgagagatggagctaccgtgtccaggatgaagctgcaggtctgggggacactgaccagcttgggctccacgctgccctgccgttccctcagctcccacaagctaccctgggtgacagtctcacatcacgacccggaggtccccttcaaccacagcttcatcgagccgccctctgccggctgggccactgatgactccttctcatccgatcctgagtctggagaggcagatgaggttcctgcctactgtgtgccaccccaagaagggatggtccctgtggcccaggcagggtcgtcagaggccagcctggctgcaggtgctttcccgccccctgaggacgcctccacgccattcgccatcccgcgcacctccagcctagctcgggccaagcggccatcggtctccttcgcggaaggtaccaagtttgcaccacagagtcgccgaagctcaggggagctctccagcccgctccgaaagcccaagaggctctcccggggggcgcagtcgggtcctgagggccgggaagccgaagagtccacaggcccagacgaagcagaagcccccgagtcctttccggcggctgccagtcccggggattcagccactggccaccggcggcccccacttggtagccggacagtggctgagcacgtggaagccattgagggcagcgtccaggagagctcgggccctgtgaccacgatctacatgctggcagggaagccccgcggatccgaaggccctgtccgctctgtcttccgccattttggtagcttccagaaaggccaggcggaagccaaggtcaagagggccatccctaagcctccgcgccaggccctgaatcggaaaaagggcagccctggccttgcctctggctctgtcggccagagccccaactcagccccaaaagctgggcttcctggggccacagggcctatggcagtcagaccagaggaagcggtccgggggctgggggctggcaccgagagttcaaggagagcccaggagccagtctctggctgtggctccccagaacaggatccccagaagcaggctgaagaggaaaggcaggaggaacctgagtatgagaatgttgtacccatctccaggccaccagaaccctgatgaccttgaatttggggagtggggagagtggatggactagactgtgctgtgtgctggaaaatgatcccggggccaggacagacaaaccagagcctctgcgcctccacagggaaaaggcaaggcttccaggccagttggcccaggcccctggcagtgctcccggaggggcccaggaaggcctgggcagagaccctgtaggatggggtcaggaagggttgcctgcagggacttttgctctgctgtcctggaccctgtgtgcctcataagggctattctttctttcacgtgcaaaacatttttctgaaatagcaaacaacctacatgtttgctgataaaagattggctaaacaaaattttttttttttttgagacagaatctccctctgtcccccaggctggagtgcagtggtgcgatctcggctcactgcaagctctgcctcccgggttcacgcccttctcctgcctcagcctcccgagtagctgggactacaggtgccctccaccacgcttggctaatttttttgtatatttaatagagacagggtttcaccatgttagccaggatggtctcgatctcctgacctcgtgatccacctgcctcggcctccccaaagtgctgggatgacaggcatgagccaccacgcctggtctatgaactttttaaaaaggatgtatgtgtataaacagattcaagggaaaggcactaaatggttttttcctctggaagatgagattgtaggtgatatttattttcttctgaaacttttgtatagtttgcaaattttctacagtgaacattcttttttacttttgttactagattgaatttgataaagtataataaaaagcaatgatctttgttaaaaaataaaaagtactaacattacag

SEQ ID NO: 130 - protein, 830 aa, Homo sapiens
MGLGLLLPLLLLWTRGTQGSELDPKGQHVCVASSPSAELQCCAGWRQKDQECTIPICEGPDACQKDEVCVKPGLCRCKPGFFGAHCSSRCPGQYWGPDCRESCPCHPHGQCEPATGACQCQADRWGARCEFPCACGPHGRCDPATGVCHCEPGWWSSTCRRPCQCNTAAARCEQATGACVCKPGWWGRRCSFRCNCHGSPCEQDSGRCACRPGWWGPECQQQCECVRGRCSAASGECTCPPGFRGARCELPCPAGSHGVQCAHSCGRCKHNEPCSPDTGSCESCEPGWNGTQCQQPCLPGTFGESCEQQCPHCRHGEACEPDTGHCQRCDPGWLGPRCEDPCPTGTFGEDCGSTCPTCVQGSCDTVTGDCVCSAGYWGPSCNASCPAGFHGNNCSVPCECPEGLCHPVSGSCQPGSGSRDTALIVGSLVPLLLLFLGLACCACCCWAPRSDLKDRPARDGATVSRMKLQVWGTLTSLGSTLPCRSLSSHKLPWVTVSHHDPEVPFNHSFIEPPSAGWATDDSFSSDPESGEADEVPAYCVPPQEGMVPVAQAGSSEASLAAGAFPPPEDASTPFAIPRTSSLARAKRPSVSFAEGTKFAPQSRRSSGELSSPLRKPKRLSRGAQSGPEGREAEESTGPDEAEAPESFPAAASPGDSATGHRRPPLGSRTVAEHVEAIEGSVQESSGPVTTIYMLAGKPRGSEGPVRSVFRHFGSFQKGQAEAKVKRAIPKPPRQALNRKKGSPGLASGSVGQSPNSAPKAGLPGATGPMAVRPEEAVRGLGAGTESSRRAQEPVSGCGSPEQDPQKQAEEERQEEPEYENVVPISRPPEP

SEQ ID NO: 131 - DNA, 4503 bp, Caenorhabditis elegans
  CDS (1)..(4503)
atgaagttcattggaacttccggttcaattacattgggagcagacatcatatgtcggattggttgtcagttcaattatcaagcatctgcaacctgcaattctgttggggcgtctgtcgcaactgtagtcaccgctgataatcctcgacgttcagtgtctttccctatttattgtgcaagcttagcatatgcaagcagtaaatacaacaatatctcgtcagaaacagtcggaatcgcccatctggaacatagacaatcccttgcgaaagacttcacgtgttccaatgcgagccaagaaacatttggacaaagaagttttgttattcttgctgaaaacacaaaagacactgatgtgatgaaaagttccgtggataacgttttcagaaacaagaatagtatcttctaccagcttagtccttttgtcaactctgctcctccacagcgatatgcaaactttttcgctgttctgaataaatgttccgaaactgcacaaacggagcaaagctctgactatggaacgtttttaacaaaagttatgaatgttactagtaaatcacaacaacgacccaatgatccaagtgatcctgtcaaggtcacaaatttcctgcctcaagcaattgcaggagcgaacgcctattctgacattctgcttgtgattaattataacgtgtctaccattaccgacaacgatgctaccgaaatcaaaagtgcattagaaaaacaaagatctcgactatacattctttttgttcaaacgtatttcaactacactgatacttactatgccatgaacaaactggcgattgcgagtggaggagtggcgattcgagtgaacacttatgatgatttgagcacgttctttgcacaatacttcccacttctcgttgcaaatgacattgtcgcaaaagcatatgctgaaaacccaagacctggagttgcgttgaataatgtcaatctacttgctcaacaatatgttcttcttgtaacaaatgaggattcattgggagatggcccggtgccagcatcggtaactgttaccgggattaatgttacacaactaccaacaattggcgaacttcaattattcactcttattccagaaaaggctggaaaattcactccattgttctattcatcttcatcttttgatgacgggtcaaaaattaccattacatacagtgatgcaacaaacccagcaaatccaatttataatggaaatattacgtctgctttaaatgactgcaaatattatgcaaacacaaaaaattacgcctgggcctgtagtatttccgaaatcgcattattattacaattttcaatgagaaatattcagatcgatagagttttgaacggtgaaacgatttcgagaaccttcccaattacttgccttggagcagatgtaggagactgcctcaacggtggaaatctaacagatgctggttcatgcatttgcccattacagtggacaggaactaactgtcaagctccgcaatgcttgaatggaggtacactgaaaactgatgacacttgtgcatgtctcgatagtttcaaaggagatttttgtgaaacaagtacctctgtttgcgctggagctccgacatctccggactatcgctctgaactgagttcattggtaattgttgctgatgtcaacgcattatcaacaagtagtctaagcaatacggtacccggaataactggagtgccaattactgtcattctatatggcgatggaaatgctccaagaattgttcagtctacaactaacagtgagcatctctccgaggtattaggtgcaccgacgggtaccacaacttcaccaagttcaacggcttcaccagcaccatccgcaagtgatatgtataaggctctgaatttggcacttgacaatcagctcaccgaccgtgcatttgtaattgtatacacatcaaattccaatgtcaccattgatcctgactttttgatccgtttggcagtcagaagagccgaagtacgagtgttgtcaacttcgggaactgaaagtcaaaactctataacattatcgctagtcggaaatggaattcctattgcgataaatggcgcgaaagatttcgaaaattacctgacatactacgttgttcccttattccaatcactacaataccaagtgaacactccacaacgagtgttcaatgtgttccaaacaggtcaattctacaactctacgcaaatttctatcccagcagattccacatttgataacgctaaaccaaatctttttgtgcatgtgtacgaaggtcgcattaattattcagatccttcaacaaatggaaacgaggttggcaattctactatatactttctcccttatgaccccacaaaacctatcaacttaattgtgaataataatggcacgaccggttactacgcaatcgaagtcatcggatatctaaagacatcatatggtttcaatattgataatgctaacggatcaaatgaaaacctgaactcgggagtagtatataaccaacaaaacacattgaatatctattctgcgccgttttcacagcttcctaaaactgatccatcaaacttcccatatctcacacttggagaaattgccagtaacggaacagttttacctgcaacaacagttttgtttacaagaaaaagtggtgcgtcctgtttttacagtcacttcaccgttcttgatgtctgctcccaaagcacaacaattggatatcaggcacagttgaccacaagaacaagcaccttgacaaataggattcaacaatttgtgctgacatgctttaaaacaagttatgcaaataatgatacttcctgccatggacatggatcaccaatggcaacctgtgcctgtaatgctgacttcggaggaattgattgcactgaaccggcttgtgtaaatggaggtgttcgggatgggtcggtttgtcgttgtcctgtaagattctatgggcttcgatgtgaagaatgtgagtctaggcaaaatctgcctataagaaaattatccacacctaattacggacaaattactgacaaattactggtaaagaaattcattcagttcccttttgaatcagaaccagcttcgtctactgtctccgtgataacttcaactactatgctgccttctacgtcaactgttgctccaagcacaagccaatcaacaatagtttccactgttactacacagtcaccaagtccttcaacaacagctccaaaacaagtccgagctgctgcattcattattgactgcatgggaactgatgattatgctttcaatcagacattcaaatcgattgcacagtacttcaagacatttggctatagccattacatcatgttaaccaataatttgaatggaagtttacaattgaacaatggaagtttactatttgaagatttccaacaatattcagatgagagtatgattatgagcaaactacccctgtattggagtttaagagccaccccaagtagaaccgctagcgtcagcaacgcgctcagtaagattcttgcaagttacaatagaaacggtacagagttcaaaaactctgtaagcatgaatattttttatgcaactcaaatagggctgggcgatgaggatccaactgcagcaggcttagaagttttcaacaagagcgcgattgtatattctgcattcgcaaaaaatgccaaccagacaattgtgacttctcttcaaaaattcagtaccgacgtaaccactgctagagattattacagtggtctttctgatatgtatgaaagcactcaaccccagggttcgaatgagctccctccaaaaccggatcaacttagttgtgtgtacggcctgcaatcgaatatcaaaattgcaattgatagatccaactcgtcaaacccagaggttaacacaattatgaataatttccttgtcaatttccgtcttggatttaattatattgaaaatgatgacaacagatgcggggataagttaccagaattttataccggacgaactgcattaacggcgttcccgtattatgatgccattgcaaaaatagcaacattttgtccatctcaatacacttcgatgctatcattccaagtcgtcggaagccaattacagccaaacttcaccgataaatatgtcaaagtcattagcaagaacattaacagtgccgattgttcgtgcaacagattcaacgacactaacactgcgaagtttatcatttggatgcctcgttctgcagcgcccgtcactgatgatgattatttaaccttgctcaaactcaacaccacaaatgcatatcactttgtcgttccattttacgatagtgctgataacagtaccgatttgtactaccagattcttgtgaagcaagcaggacccgaaggtcccgattattattggttaccaaatgcagttaatgctacaaatttgcaaacgaatgtaataaatattctatacgagaagctttgccaaactgccggtgttgacccaacagcaatcccaccataa

SEQ ID NO: 132 - protein, 1500 aa, Caenorhabditis elegans
MKFIGTSGSITLGADIICRIGCQFNYQASATCNSVGASVATVVTADNPRRSVSFPIYCASLAYASSKYNNISSETVGIAHLEHRQSLAKDFTCSNASQETFGQRSFVILAENTKDTDVMKSSVDNVFRNKNSIFYQLSPFVNSAPPQRYANFFAVLNKCSETAQTEQSSDYGTFLTKVMNVTSKSQQRPNDPSDPVKVTNFLPQAIAGANAYSDILLVINYNVSTITDNDATEIKSALEKQRSRLYILFVQTYFNYTDTYYAMNKLAIASGGVAIRVNTYDDLSTFFAQYFPLLVANDIVAKAYAENPRPGVALNNVNLLAQQYVLLVTNEDSLGDGPVPASVTVTGINVTQLPTIGELQLFTLIPEKAGKFTPLFYSSSSFDDGSKITITYSDATNPANPIYNGNITSALNDCKYYANTKNYAWACSISEIALLLQFSMRNIQIDRVLNGETISRTFPITCLGADVGDCLNGGNLTDAGSCICPLQWTGTNCQAPQCLNGGTLKTDDTCACLDSFKGDFCETSTSVCAGAPTSPDYRSELSSLVIVADVNALSTSSLSNTVPGITGVPITVILYGDGNAPRIVQSTTNSEHLSEVLGAPTGTTTSPSSTASPAPSASDMYKALNLALDNQLTDRAFVIVYTSNSNVTIDPDFLIRLAVRRAEVRVLSTSGTESQNSITLSLVGNGIPIAINGAKDFENYLTYYVVPLFQSLQYQVNTPQRVFNVFQTGQFYNSTQISIPADSTFDNAKPNLFVHVYEGRINYSDPSTNGNEVGNSTIYFLPYDPTKPINLIVNNNGTTGYYAIEVIGYLKTSYGFNIDNANGSNENLNSGVVYNQQNTLNIYSAPFSQLPKTDPSNFPYLTLGEIASNGTVLPATTVLFTRKSGASCFYSHFTVLDVCSQSTTIGYQAQLTTRTSTLTNRIQQFVLTCFKTSYANNDTSCHGHGSPMATCACNADFGGIDCTEPACVNGGVRDGSVCRCPVRFYGLRCEECESRQNLPIRKLSTPNYGQITDKLLVKKFIQFPFESEPASSTVSVITSTTMLPSTSTVAPSTSQSTIVSTVTTQSPSPSTTAPKQVRAAAFIIDCMGTDDYAFNQTFKSIAQYFKTFGYSHYIMLTNNLNGSLQLNNGSLLFEDFQQYSDESMIMSKLPLYWSLRATPSRTASVSNALSKILASYNRNGTEFKNSVSMNIFYATQIGLGDEDPTAAGLEVFNKSAIVYSAFAKNANQTIVTSLQKFSTDVTTARDYYSGLSDMYESTQPQGSNELPPKPDQLSCVYGLQSNIKIAIDRSNSSNPEVNTIMNNFLVNFRLGFNYIENDDNRCGDKLPEFYTGRTALTAFPYYDAIAKIATFCPSQYTSMLSFQVVGSQLQPNFTDKYVKVISKNINSADCSCNRFNDTNTAKFIIWMPRSAAPVTDDDYLTLLKLNTTNAYHFVVPFYDSADNSTDLYYQILVKQAGPEGPDYYWLPNAVNATNLQTNVINILYEKLCQTAGVDPTAIPP

SEQ ID NO: 133 - DNA, 369 bp, Homo sapiens
  CDS (89)..(268)
gtattaagctcaatattagcattaatccatttatttgttaaaatctaatattgtattcttgtcttaaacagtgactttgtttttgtaggctgcatcccatatctatcaaaatcaatttgttcaaatgatcctcaattcacttattaacaagtcaaaatcttctatgttccaagtcagaactttgagagaactgttatggggctatagggatccatttttgagtttggttccgtaccctgttactaccacagttggtctgttttatcctgtaagtaccaaatatgaatggcaatattattacattttaatttaattaattcaatggcattggcaaggcataattttataatttagctcattagctatgct

SEQ ID NO: 134 - protein, 60 aa, Homo sapiens
AASHIYQNQFVQMILNSLINKSKSSMFQVRTLRELLWGYRDPFLSLVPYPVTTTVGLFYP

SEQ ID NO: 135 - DNA, 3412 bp, Homo sapiens
  CDS (27)..(2519)
cgagcgctcccaccgagctgcctgccatggggctggggctgctgctcccgctgctgctgctctggactcgggggactcaggggtccgagctggaccccaaagggcagcacgtctgtgtggccagcagcccctctgctgagctgcagtgctgcgcaggctggaggcagaaggatcaagaatgcaccatccccatctgtgaggggccggacgcctgccagaaagacgaggtgtgtgtgaagccgggcctctgtcgatgcaagcctggattctttggggcccactgcagctcccgctgcccgggccagtactggggccccgactgccgtgagagctgcccctgccacccgcacggccagtgcgagccagccacgggcgcgtgccagtgccaggccgaccgctggggagcccgctgcgagttcccgtgcgcctgcggcccccacgggcgctgcgaccccgcgaccggcgtgtgccactgcgaacccggctggtggtcgtccacgtgccgccgcccgtgccagtgcaacaccgcggcggcgcgctgcgagcaggccacgggcgcctgcgtgtgcaagccgggctggtgggggcgccgctgcagcttccgctgcaactgccacggctccccgtgcgagcaggactccggccgctgcgcctgccggccgggctggtggggtcccgaatgccagcagcagtgcgagtgtgtgcggggccgctgcagcgccgcctccggcgagtgcacctgcccgcccggcttccgcggagcgcgctgcgagctgccctgcccggcaggcagccacggggtgcagtgcgcacacagctgtggccgctgcaaacacaatgagccgtgctctccagacacaggcagctgtgagtcctgcgagccgggctggaacgggacccagtgccagcagccctgcctgcctggcacctttggcgagagctgcgaacagcagtgccctcactgccgacatggggaggcctgtgagccagatactggccactgtcagcgctgtgaccctggctggctggggcccaggtgtgaagacccctgccccactggtacctttggggaagactgtggctctacctgccccacctgtgttcaggggtcctgtgatactgtgacaggggactgtgtctgcagtgccggctactgggggcccagctgcaacgcctcctgcccagccggtttccatggaaacaactgctcagttccttgtgaatgcccagagggactctgccaccctgtctctgggtcctgccagccaggctctggcagtcgggacactgccctcatcgcgggcagccttgtgcctctgctgctgctcttcctgggccttgcctgctgtgcctgctgctgctgggccccccgatcagacctcaaggacaggccagcgagagatggagctaccgtgtccaggatgaagctgcaggtctgggggacactgaccagcttgggctccacgctgccctgccgttccctcagctcccacaagctaccctgggtgacagtctcacatcacgacccggaggtccccttcaaccacagcttcatcgagccgccctctgccggctgggccactgatgactccttctcatccgatcctgagtctggagaggcagatgaggttcctgcctactgtgtgccaccccaagaagggatggtccctgtggcccaggcagggtcgtcagaggccagcctggctgcaggtgctttcccgccccctgaggacgcctccacgccattcgccatcccgcgcacctccagcctagctcgggccaagcggccatcggtctccttcgcggaaggtaccaagtttgcaccacagagtcgccgaagctcaggggagctctccagcccgctccgaaagcccaagaggctctcccggggggcgcagtcgggtcctgagggccgggaagccgaagagtccacaggcccagaggaagcagaagcccccgagtcctttccggcggctgccagtcccggggattcagccactggccaccggcggcccccacttggtggccggacagtggctgagcacgtggaagccattgagggcagcgtccaggagagctcgggccctgtgaccacgatctacatgctggcagggaagccccgcggatccgaaggccctgtccgctctgtcttccgccattttggtagcttccagaaaggccaggcggaagccaaggtcaagagggccatccctaagcctccgcgccaggccctgaatcggaaaaagggcagccctggccttgcctctggctctgtcggccagagccccaactcagccccaaaagctgggcttcctggggccacagggcctatggcagtcagaccagaggaagcggtccgggggctgggggctggcaccgagagttcaaggagagcccaggagccagtctctggctgtggctccccagaacaggatccccagaagcaggctgaagaggaaaggcaggaggaacctgagtatgagaatgttgtacccatctccaggccaccagaaccctgatgaccttgaatttggggagtggggagagtggatggactagactgtgctgtgtgctggaaaatgatcccggggccaggacagacaaaccagagcctctgcgcctccacagggaaaaggcaaggcttccaggccagttggcccaggcccctggcagtgctcccggaggggcccaggaaggcctgggcagagaccctgtaggatggggtcaggaagggttgcctgcagggacttttgctctgctgtcctggaccctgtgtgcctcataagggctattctttctttcacgtgcaaaacatttttctgaaatagcaaacaacctacatgtttgctgataaaagattggctaaacaaatttttttttttttttttgagacagaatctccctctgtcccccaggctggagtgcagtggtgcgatctcggctcactgcaagctctgcctcccgggttcacgcccttctcctgcctcagcctcccgagtagctgggactacaggtgccctccaccacgcttggctaatttttttgtatatttaatagagacagggtttcaccatgttagccaggatggtctcgatctcctgacctcgtgatccacctgcctcggcctcccaaagtgctgggatgacaggcatgagccaccacgcctggtctatgaactttttaaaaaggatgtatgtgtataaaaacagattcaagggaaaggcactaaatggttttttcctctggaagatgagattgtaggtgatatttattttcttctgaaacttttgtatagtttgcaaattttctacagtgaacattcttttttacttttgttactagattgaatttgataaagtataataaaaagcaatgatctttgttaaaaaaataaaaagtactaacattacag

SEQ ID NO: 136 - protein, 830 aa, Homo sapiens
MGLGLLLPLLLLWTRGTQGSELDPKGQHVCVASSPSAELQCCAGWRQKDQECTIPICEGPDACQKDEVCVKPGLCRCKPGFFGAHCSSRCPGQYWGPDCRESCPCHPHGQCEPATGACQCQADRWGARCEFPCACGPHGRCDPATGVCHCEPGWWSSTCRRPCQCNTAAARCEQATGACVCKPGWWGRRCSFRCNCHGSPCEQDSGRCACRPGWWGPECQQQCECVRGRCSAASGECTCPPGFRGARCELPCPAGSHGVQCAHSCGRCKHNEPCSPDTGSCESCEPGWNGTQCQQPCLPGTFGESCEQQCPHCRHGEACEPDTGHCQRCDPGWLGPRCEDPCPTGTFGEDCGSTCPTCVQGSCDTVTGDCVCSAGYWGPSCNASCPAGFHGNNCSVPCECPEGLCHPVSGSCQPGSGSRDTALIAGSLVPLLLLFLGLACCACCCWAPRSDLKDRPARDGATVSRMKLQVWGTLTSLGSTLPCRSLSSHKLPWVTVSHHDPEVPFNHSFIEPPSAGWATDDSFSSDPESGEADEVPAYCVPPQEGMVPVAQAGSSEASLAAGAFPPPEDASTPFAIPRTSSLARAKRPSVSFAEGTKFAPQSRRSSGELSSPLRKPKRLSRGAQSGPEGREAEESTGPEEAEAPESFPAAASPGDSATGHRRPPLGGRTVAEHVEAIEGSVQESSGPVTTIYMLAGKPRGSEGPVRSVFRHFGSFQKGQAEAKVKRAIPKPPRQALNRKKGSPGLASGSVGQSPNSAPKAGLPGATGPMAVRPEEAVRGLGAGTESSRRAQEPVSGCGSPEQDPQKQAEEERQEEPEYENVVPISRPPEP

SEQ ID NO: 137 - DNA, 3763 bp, Mus musculus
  CDS (48)..(1139)
gaggtcctcgactgtttcagtttttcactcttagcatgaatttggaaatgacttttgatgacaagatgaagcctgcgaatgacgagcctgatcagaagtcatgtggcaagaagcctaaaggtctgcatttgctttcctccccatggtggttccctgctgctatgactctggtcatcctctgcctggtgttgtcagtgacccttattgtacagtggacacaattacgccaggtatctgacctcttaaaacaataccaagcgaaccttactcagcaggatcgtatcctggaagggcagatgttagcccagcagaaggcagaaaacgcttcacaggaatcaaagaaggaactgaaaggaaagatagacaccctcacccagaagctgaatgagaaatccaaagagcaggaggagcttctacagaagaatcagaacctccaagaagccctgcaaagagctgcaaactcttcagaggagtcccagagagaactcaagggaaagatagacaccatcacccggaagctggacgagaaatccaaagagcaggaggagcttctgcagatgattcagaacctccaagaagccctgcagagagctgcaaactcttcagaggagtcccagagagaactcaagggaaagatagacaccctcaccttgaagctgaacgagaaatccaaagagcaggaggagcttctacagaagaatcagaacctccaagaagccctgcaaagagctgcaaacttttcaggtccttgtccacaagactggctctggcataaagaaaactgttacctcttccatgggccctttagctgggaaaaaaaccggcagacctgccaatctttgggtggccagttactacaaattaatggtgcagatgatttgacattcatcttacaagcaatttcccataccacctccccgttctggattggattgcatcggaagaagcctggccaaccatggctatgggagaatggaactcctttgaattttcaattctttaagaccaggggcgtttctttacagctatattcatcaggcaactgtgcataccttcaagacggagctgtgttcgctgaaaactgcattctaattgcattcagcatatgtcagaagaagacaaatcatttgcaaatttagtgaatctaaagattctggagaagaccatgagaagacttttgactgtcgctctgaaatttaagctattttttattacctgcatgtaaagcatgttggccttgacatctgtcagttacctgatagctacagttcacctcatcaaagacaaggaccagaagcaaatactggtggatccagatgtttgaaatctttgtatcaaaacgtgtgagttcaattgtttatccatatacactggccttgcccctccaaagtctcccaaccaacctgcactccttcttcccctttgtgttttaaatgatgcttcctgcctgacctggccatgctttgtactcagtctcctctacctcagtatgcctcctgttgctgcatgaaagacaggatgtagaaatcctcctcaagtgcaggcagagggctcaaaggcaaagctcgtccgagaaataacatgcaaagaaacagaactggaaaaactacactgcaaacaggaactcatgatctctaaaaagccatggcttgatctttatgacaggagtccatctccagactgcacttttacacacatattttttattttacttttattgtgaagtttatggatagtttgcctacttgaattctgtgtaccacatgagtgcctggtgccactgaagatcagaagaggacatcagattctctggatctggaattccagatggttgtaagctgctatgtagatgtgaagaattgaattcggtgtcccctggaagaacagccagtactctttgccatgagctatctctcaagctcctgtgatcaattcttgtatcagttatgtctccatttttgctctaccaaagaacagtgttataactttaaaacagtaagtattttcattattctaggggtaatatagcagatatagatagagatagagatagagatagagatagagatagagatagagatagagatagagatagagataggtataggtataggtataggtataggtataggtataggtataggtataggtataggtagatagagatagaggtagaggtagaggtagaggtagaggtagaggtagaggtagaggtagagatagagatagagatagagatagagatagagatagagatagagatagagatagagatagagatagagatagagatagagatagagatagagatagagatagagatagagatagatagtgtgtgtgtgcgtgtgtgtgtttctatgctaggtacgatccttgaggagatgagacagttttgtgtgaaatgagtttgtaataatccaaatttaaaaataaattcgatgattacctgtagtggtcatattaccacagccaagatgatgaacatacctgtcacttctgccccttcccaaagcctcctccctaaaacaaacaccaatctgctttcagttcgcattttatagagcttctcattttgtttttaagacagaatctcatatagtcctggctggcctggaactcactacacagagcaggctggcctccaccttctagagctcctcctgccagactcccaaaccttaagactgaaggagtgccctgccgtgtgtgactcaaacaccttaatgtgaatggaacagcataagatgtccaggttttttcagtccagcttcttccacttggtacaatttttaatttttgtgttcatacatctccaccacagtgtttgtatcagttcatcattcttttcaaatgttgagccttcccctgtggatctatagtgtcatttgttatctgtgtatttgttgatgccatttgggttggttttgtctggggtcacctacaaataaagctgctatggatgtccatggacaaggctaatatcttaggtaagcacctacgagtaagatgcttgggtcattcagtgtgggaatatatggttggctattttaaccattcctgtttgaaaacattaattttttttatttttgaaatcaattttttaaaaaattaattagtctattttacatctcaaccccagtttctcttcctcctctcctctcaaccttctcccaccttctctccctgaccccatccacccctcctccctttctctccagaagaggggaggcctcccatggatgccaaccagcctcagcatctcaagttacagtaagaataggtttgtcttctcctgtgaaaatcttaatttttagatttatctattatatatgcagtactttgcttgcacatatgtattggtaccatgtacatgcatggtaccagagaaagtcagaagaggccattgtattttctgggactggaattacagacgtttttgaacaatcctatagactctgggaactgaacccaggtcgtctggaaaggcaagcagtgctcttaacccctgagccatttcttctggccttttagcaatttttattaatatataactgtgtatacttgcacttttagctcgaagttcttaagtgtcaaatagtcttggatttattttcatgttatcactgtctgtacaatttctgtgatgaaataactgagcatatattttgagaatttggttttcttaaattttaaatctgaaggatttacatatttgagaataaaaaccagccagatacataaaaaaaaaaaaaaaaaaaaa

SEQ ID NO: 138 - protein, 363 aa, Mus musculus
MTFDDKMKPANDEPDQKSCGKKPKGLHLLSSPWWFPAAMTLVILCLVLSVTLIVQWTQLRQVSDLLKQYQANLTQQDRILEGQMLAQQKAENASQESKKELKGKIDTLTQKLNEKSKEQEELLQKNQNLQEALQRAANSSEESQRELKGKIDTITRKLDEKSKEQEELLQMIQNLQEALQRAANSSEESQRELKGKIDTLTLKLNEKSKEQEELLQKNQNLQEALQRAANFSGPCPQDWLWHKENCYLFHGPFSWEKNRQTCQSLGGQLLQINGADDLTFILQAISHTTSPFWIGLHRKKPGQPWLWENGTPLNFQFFKTRGVSLQLYSSGNCAYLQDGAVFAENCILIAFSICQKKTNHLQI

SEQ ID NO: 139 - DNA, 1102 bp, Homo sapiens
  CDS (44)..(1102)
gcgtcgacgtcttgccaccgcatctggagaaccagcggttaccatggaggggatcagtatatacacttcagataactacaccgaggaaatgggctcaggggactatgactccatgaaggaaccctgtttccgtgaagaaaatgctaatttcaataaaatcttcctgcccaccatctactccatcatcttcttaactggcattgtgggcaatggattggtcatcctggtcatgggttaccagaagaaactgagaagcatgacggacaagtacaggctgcacctgtcagtggccgacctcctctttgtcatcacgcttcccttctgggcagttgatgccgtggcaaactggtactttgggaacttcctatgcaaggcagtccatgtcatctacacagtcaacctctacagcagtgtcctcatcctggccttcatcagtctggaccgctacctggccattgtccacgccaccaacagtcagaggccaaggaagctgttggctgaaaaggtggtctatgttggcgtctggatccctgccctcctgctgactattcccgacttcatctttgccaacgtcagtgaggcagatgacagatatatctgtgaccgcttctaccccaatgacttgtgggtggttgtgttccagtttcagcacatcatggttggccttatcctgcctggtattgtcatcctgtcctgctattgcattatcatctccaagctgtcacactccaagggccaccagaagcgcaaggccctcaagaccacaatcatccccatcctggctttcttcgcctgttggctgccttactacattgggatcagcatcgactccttcatcctcctggaaatcatcaagcaagggtgtgagtttgagaacactgtgcacaagtggatttccatcaccgaggccctagctttcttccactgttgtctgaaccccatcctctatgctttccttggagccaaatttaaaacctctgcccagcacgcactcacctctgtgagcagagggtccagcctcaagatcctctccaaaggaaagcgaggtggacattcatctgtttccactgagtctgagtcttcaagttttcactccagctaa

SEQ ID NO: 140 - protein, 352 aa, Homo sapiens [sequence omitted]

SEQ ID NO: 141 - DNA, 31 bp, Unknown
  Primer
ctccaagctttgvccagcgagaaaagcgaag

SEQ ID NO: 142 - DNA, 45 bp, Unknown
  Primer
gcctcctgcagatccaccgcctccggatgtatataaatatatatc

SEQ ID NO: 143 - DNA, 30 bp, Unknown
  Primer
gcctcctgcagatgtatataaatatatatc

SEQ ID NO: 144 - protein, 13 aa, Homo sapiens
SEQKLISEEDLNN

SEQ ID NO: 145 - protein, 66 aa, Homo sapiens
MNAAASGPSNTPPEIAAARAHYNIVTFAAAIYKKSQHMAAAVNIRNCCYIAAASEQKLISEEDLNN

SEQ ID NO: 146 - DNA, 27 bp, Unknown
  Primer
agcttggctgttccgccatggctcgag

SEQ ID NO: 147 - DNA, 36 bp, Unknown
  Primer
ccgaattcaagcttagatgctctagcaaaagccaag

SEQ ID NO: 148 - DNA, 39 bp, Unknown
  Primer
cccctgcagttaggatccctcgagaggtaaaatttcatc

SEQ ID NO: 149 - DNA, 30 bp, Unknown
  Primer
ccgaattctcgaggctcctaaagaaaatac

SEQ ID NO: 150 - DNA, 41 bp, Unknown
  Primer
ccaagcttggatcctgcgcagatcttggtgttggttttttg

SEQ ID NO: 151 - DNA, 21 bp, Unknown
  Primer
aattaccatggaattcctgca

SEQ ID NO: 152 - DNA, 13 bp, Unknown
  Primer
tggtaccttaagg

SEQ ID NO: 153 - DNA, 29 bp, Unknown
  Primer
actctagagttcgatctcccttgcagcag

SEQ ID NO: 154 - DNA, 29 bp, Unknown
  Primer
acagatctgttcgatctcccttgcagcag

SEQ ID NO: 155 - DNA, 25 bp, Unknown
  Primer
ctcggatccctggcacctctaaccc

SEQ ID NO: 156 - DNA, 24 bp, Unknown
  Primer
ggtctagaaccctcaaacaagccc

SEQ ID NO: 157 - DNA, 36 bp, Unknown
  Primer
acatgcatgcactagtgcgcgcgttgacattgatta

SEQ ID NO: 158 - DNA, 36 bp, Unknown
  Primer
acatgcatccatgtgagagctctgcttatatagacc

SEQ ID NO: 159 - protein, 4 aa, Unknown
  Consensus sequence
CVIA

SEQ ID NO: 160 - protein, 6 aa, Unknown
  Conserved domain
  MISC_FEATURE (3)..(3): Xaa can be any amino acid
  MISC_FEATURE (6)..(6): Xaa can be any amino acid
LPXTGX

SEQ ID NO: 161 - protein, 6 aa, Homo sapiens
VTYAQL

SEQ ID NO: 162 - protein, 6 aa, Homo sapiens
IVYELL

SEQ ID NO: 163 - protein, 251 aa, Streptococcus pyogenes
MENNKKVLKKMVFFVLVTFLGLTISQEVFAQQDPDPSQLHRSSLVKNLQNIYFLYEGDPVTHENVKSVDQLLSHDLIYNVSGPNYDKLKTELKNQEMATLFKDKNVDIYGVEYYHLCYLCENAERSACIYGGVTNHEGNHLEIPKKIVVKVSIDGIQSLSFDIETNKKMVTAQELDYKVRKYLTDNKQLYTNGPSKYETGYIKFIPKNKESFWFDFFPEPEFTQSKYLMIYKDNETLDSNTSQIEVYLTTK

SEQ ID NO: 164 - protein, 398 aa, Streptococcus pyogenes
MNKKKLGIRLLSLLALGGFVLANPVFADQNFARNEKEAKDSAITFIQKSAAIKAGARSAEDIKLDKVNLGGELSGSNMYVYNISTGGFVIVSGDKRSPEILGYSTSGSFDANGKENIASFMESYVEQIKENKKLDTTYAGTAEIKQPVVKSLLDSKGIHYNQGNPYNLLTPVIEKVKPGEQSFVGQHAATGCVATATAQIMKYHNYPNKGLKDYTYTLSSNNPYFNHPKNLFAAISTRQYNWNNILPTYSGRESNVQKMAISELMADVGISVDMDYGPSSGSAGSSRVQRALKENFGYNQSVHQINRSDFSKQDWEAQIDKELSQNQPVYYQGVGKVGGHAFVIDGADGRNFYHVNWGWGGVSDGFFRLDALNPSALGTGGGAGGFNGYQSAVVGIKP

SEQ ID NO: 165 - protein, 234 aa, Streptococcus pyogenes
MKKINIIKIVFIITVILISTISPIIKSDSKKDISNVKSDLLYAYTITPYDYKDCRVNFSTTHTLNIDTQKYRGKDYYISSEMSYEASQKFKRDDHVDVFGLFYILNSHTGEYIYGGITPAQNNKVNHKLLGNLFISGESQQNLNNKIILEKDIVTFQEIDFKIRKYLMDNYKIYDATSPYVSGRIEIGTKDGKHEQIDLFDSPNEGTRSDIFAKYKDNRIINMKNFSHFDIYLE

SEQ ID NO: 166 - protein, 210 aa, Streptococcus pyogenes
DENLKDLKRSLRFAYNITPCDYENVEIAFVTTNSIHINTKQKRSECILYVDSIVSLGITDQFIKGDKVDVFGLPYNFSPPYVDNIYGGIVKHSNQGNKSLQFVGILNQDGKETYLPSEVVRIKKKQFTLQEFDFKIRKFLMEKYNIYDSESRYTSGSLFLATKDSKHYEVDLFNKDDKLLSRDSFFKRYKDNKIFNSEEISHFDIYLKTY

SEQ ID NO: 167 - protein, 236 aa, Streptococcus pyogenes
MRYNCRYSHIDKKIYSMIICLSFLLYSNVVQANSYNTTNRHNLESLYKHDSNLIEADSIKNSPDIVTSHMLKYSVKDKNLSVFFEKDWISQEFKDKEVDIYALSAQEVCECPGKRYEAFGGITLTNSEKKEIKVPVNVWDKSKQQPPMFITVNKPKVTAQEVDIKVRKLLIKKYDIYNNREQKYSKGTVTLDLNSGKDIVFDLYYFGNGDFNSMLKIYSNNERIDSTQFHVDVSIS

SEQ ID NO: 168 - protein, 232 aa, Streptococcus pyogenes
MKRIIKTIILVIIIFHGYGSVKSDSENIKDVKLQLNYAYEIIPVDYTNCNIDYLTTHDFYIDISSYKKKNFSVDSEVESYITTKFTKNQKVNIFGLPYIFTRYDVYYIYGGVTPSVNSNSENSKIVGNLLIDGVQQKTLINPIKIDKPIFTIQEFDFKIRQYLMQTYKIYDPNSPYIKGQLEIAINGNKHESFNLYDATSSSTRSDIFKKYKDNKTINMKDFSHFDIYLWTK

SEQ ID NO: 169 - protein, 209 aa, Streptococcus pyogenes
LEVDNNSLLRNIYSTIVYEYSDTVIDFKTSHNLVTKKLDVRDARDFFINSEMDEYAANDFKAGDKIAVFSVPFDWNYLSKGKVTAYTYGGITPYQKTSIPKNIPVNLWINRKQIPVPYNQISTNKTTVTAQEIDLKVRKFLIAQHQLYSSGSSYKSGKLVFHTNDNSDKYSLDLFYTGYRDKESIFKVYKDNKSFNIDKIGHLDIEIDS

SEQ ID NO: 170 - protein, 210 aa, Streptococcus pyogenes
GLEVDNNSLLRNIYSTIVYEYSDIVIDFKTSHNLVTKKLDVRDARDFFINSEMDEYAANDFKTGDKIAVFSVPFDWNYLSKGKVTAYTYGGITPYQKTSIPKNIPVNLWINGKQISVPYNEISTNKTTVTAQEIDLKVRKFLIAQHQLYSSGSSYKSGRLVFHTNDNSDKYSFDLFYVGYRDKESIFKVYKDNKSFNIDKIGHLDIEIDS

SEQ ID NO: 171 - protein, 260 aa, Streptococcus pyogenes
MNKRIRILVVACVVFCAQLLSISVFASSQPDPTPEQLNKSSQFTGVMGNLRCLYDNHFVEGTNVRSTGQLLQHDLIFPIKDLKLKNYDSVKTEFNSKDLAAKYKNKDVDIFGSNYYYNCYYSEGNSCKNAKKTCMYGGVTEHHRNQIEGKFPNITVKVYEDNENILSFDITTNKKQVTVQELDCKTRKILVSRKNLYEFNNSPYETGYIKFIESSGDSFWYDMMPAPGAIFDQSKYLMLYNDNKTVSSSAIAIEVHLTKK

SEQ ID NO: 172 - protein, 242 aa, Staphylococcus aureus
MNKIFRVLTVSLFFFTFLIKNNLAYADVGVINLRNFYANYQPEKLQGVSSGNFSTSHQLEYIDGKYTLYSQFHNEYEAKRLKDHKVDIFGISYSGLCNTKYMYGGITLANQNLDKPRNIPINLWVNGKQNTISTDKVSTQKKEVTAQEIDIKLRKYLQNEYNIYGFNKTKKGQEYGYKSKFNSGFNKGKITFHLNNEPSFTYDLFYTGTGQAESFLKIYNDNKTIDAENFHLDVEISYEKTE

SEQ ID NO: 173 - protein, 217 aa, Staphylococcus aureus
EDLHDKSELTDLALANAYGQYNHPFIKENIKSDEISGEKDLIFRNQGDSGNDLRVKFATADLAQKFKNKNVDIYGASFYYKCEKISENISECLYGGTTLNSEKLAQERVIGANVWVDGIQKETELIRTNKKNVTLQELDIKIRKILSDKYKIYYKDSEISKGLIEFDMKTPRDYSFDIYDLKGENDYEIDKIYEDNKTLKSDDISHIDVNLYTKKKV

SEQ ID NO: 174 - protein, 242 aa, Staphylococcus aureus
MKKFKYSFILVFILLFNIKDLTYAQGDIGVGNLRNFYTKHDYIDLKGVTDKNLPIANQLEFSTGTNDLISESNNWDEISKFKGKKLDIFGIDYNGPCKSKYMYGGATLSGQYLNSARKIPINLWVNGKHKTISTDKIATNKKLVTAQEIDVKLRRYLQEEYNIYGHNNTGKGKEYGYKSKFYSGFNNGKVLFHLNNEKSFSYDLFYTGDGLPVSFLKIYEDNKIIESEKFHLDVEISYVDSN

SEQ ID NO: 175 - protein, 268 aa, Staphylococcus aureus
MKKTIFILIFSLTLTLLITPLVYSDSKNETIKEKNLHKKSELSSITLNNLRHIYFFNEKGISEKIMTEDQFLDYTLLFKSFFISHSQYNDLLVQFDSKETVNKFKGKQVDLYGSYYGFQCSGGKPNKTACMYGGVTLHENNQLYDTKKIPINLWIDSIRTVVPLDIVKTNKKKVTIQELDLQARYYLHKQYNLYNPSTFDGKIQKGLIVFHTSKEPLVSYDLFNVIGQYPDKLLKIYQDNKIIESENMHIDIYLYTSLIVLISLPLVL

SEQ ID NO: 176 - protein, 242 aa, Staphylococcus aureus
MKKLISILLINIIILGVSNNASAQGDIGIDNLRNFYTKKDFINLKDVKDNDTPIANQLQFSNESYDLISESKDFNKFSNFKGKKLDVFGISYNGQCNTKYIYGGITATNEYLDKPRNIPINIWINGNHKTISTNKVSTNKKFVTAQEIDIKLRRYLQEEYNIYGHNGTKKGEEYGHKSKFYSGFNIGKVTFHLNNNDTFSYDLFYTGDDGLPKSFLKIYEDNKTVESEKFHLDVDISYKETK

SEQ ID NO: 177 - protein, 240 aa, Staphylococcus aureus
MKKRLLFVIVITLFIFSSNHTVLSNGDVGPGNLRNFYTKYEYVNLKNVKDKNSPESHRLEYSYKNDTLYAEFDNEYITSDLKGKNVDVFGISYKYGSNSRTIYGGVTKAENNKLDSPRIIPINLIINGKHQTVTTKSVSTDKKMVTAQEIDVKLRKYLQDEFNIYGHNDTGKGKEYGTSSKFYSGFDKGSVVFHMNDGSNFSYDLFYTGYGLPESFLKIYKDNKTVDSTQFHLDVEISKR

SEQ ID NO: 178 - protein, 239 aa, Staphylococcus aureus
MKRILIIVVLLFCYSQNHIATADVGVLNLRNYYGSYPIEDHQSINPENNHLSHQLVFSMDNSTVTAEFKNVDDVKKFKNHAVDVYGLSYSGYCLKNKYIYGGVTLAGDYLEKSRRIPINLWVNGEHQTISTDKVSTNKKLVTAQEIDTKLRRYLQEEYNIYGFNDTNKGRNYGNKSKFSSGFNAGKILFHLNDGSSFSYDLFDTGTGQAESFLKIYNDNKTVETEKFHLDVEISYKDES

SEQ ID NO: 179 - protein, 150 aa, Yersinia pseudotuberculosis
MKKKFLSLLTLTFFSGLALAADYDNTLNSIPSLRIPNIETYTGTIQGKGEVCIRGNKEGKSRGGELYAVLRSTNANADMTLILLCSIRDGWKEVKRSDIDRPLRYEDYYTPGALSWIWEIKNNSSEASDYSLSATVHDDKEDSDVLMKCP

SEQ ID NO: 180 - protein, 67 aa, Homo sapiens
MERVQPLEENVGNAARPRFERNKLLLVASVIQGLGLLLCFTYICLHFSALQVSHRYPRIQSIKVQFT

SEQ ID NO: 181 - protein, 254 aa, Homo sapiens
MEYASDASLDPEAPWPPAPRARACRVLPWALVAGLLLLLLLAAACAVFLACPWAVSGARASPGSAASPRLREGPELSPDDPAGLLDLRQGMFAQLVAQNVLLIDGPLSWYSDPGLAGVSLTGGLSYKEDTKELVVAKAGVYYVFFQLELRRVVAGEGSGSVSLALHLQPLRSAAGAAALALTVDLPPASSEARNSAFGFQGRLLHLSAGQRLGVHLHTEARARHAWQLTQGATVLGLFRVTPEIPAGLPSPRSE

SEQ ID NO: 182 - protein, 231 aa, Staphylococcus aureus
SEKSEEINEKDLRKKSELQGTAGNKQIYYYNEKAKTENKESHDQFLQHTILFKGFFTDHSWYNDLLVDFDSKDIVDKYKGKKVDLYGAYYGYQCAGGTPNKTACMYGGVTLHDNNRLTEEKKVPINLWLDGKQNTVPLETVKTNKKNVTVQELDLQARRYLQEKYNLYNSDVFDGKVQRGLIVFHTSTEPSVNYDLFGAQGQYSNTLLRIYRDNKSINSENMHIDIYLYTS

SEQ ID NO: 183 - protein, 238 aa, Staphylococcus aureus
ESQPDPKPDELHKSSKFTGLMENMKVLYDDNHVSAINVKSIDQFLYFDLIYSIKDTKLGNYDNVRVEFKNKDLADKYKDKYVDVFGANYYYQCYFSKKTNDINSHQTDKRKTCMYGGVTEHNGNQLDKYRSITVRVFEDGKNLLSFDVQTNKKKVTAQELDYLTRHYLVKNKKLYEFNNSPYETGYIKFIENENSFWYDMMPAPGDKFDQSKYLMMYNDNKMVDSKDVKIEVYLTTKK

SEQ ID NO: 184 - protein, 240 aa, Staphylococcus aureus
MNKSRFISCVILIFALILVLFTPNVLAESQPDPTPDELHKASKFTGLMENMKVLYDDHYVSATKVKSVDKFLAHDLIYNISDKKLKNYDKVKTELLNEGLAKKYKDEVVDVYGSNYYVNCYFSSKDNVGKVTGGKTCMYGGITKHEGNHFDNGNLQNVLIRVYENKRNTISFEVQTDKKSVTAQELDIKARNFLINKKNLYEFNSSPYETGYIKFIENNGNTFWYDMMPAPGDKFDQSKY

SEQ ID NO: 185 - protein, 239 aa, Staphylococcus aureus
ESQPDPTPDELHKSSEFTGTMGNMKYLYDDHYVSATKVMSVDKFLAHDLIYNISDKKLKNYDKVKTELLNEDLAKKYKDEVVDVYGSNYYVNCYFSSKDNVGKVTGGKTCMYGGITKHEGNHFDNGNLQNVLIRVYENKRNTISFEVQTDKKSVTAQELDIKARNFLINKKNLYEFNSSPYETGYIKFIENNGNTFWYDMMPAPGDKFDQSKYLMMYNDNKTVDSKSVKIEVHLTTKNG

SEQ ID NO: 186 - protein, 266 aa, Staphylococcus aureus
MYKRLFISRVILIFALILVISTPNVLAESQPDPMPDDLHKSSEFTGTMGNMKYLYDDHYVSATKVKSVDKFLAHDLIYNISDKKLKNYDKVKTELLNEDLAKKYKDEVVDVYGSNYYVNCYFSSKDNVGKVTGGKTCMYGGITKHEGNHFDNGNLQNVLVRVYENKRNTISFEVQTDKKSVTAQELDIKARNFLINKKNLYEFNSSPYETGYIKFIENNGNTFWYDMMPAPGDKFDQSKYLMMYNDNKTVDSKSVKIEVHLTTKNG

SEQ ID NO: 187 - protein, 258 aa, Staphylococcus aureus; identical to SEQ ID NO: 10

SEQ ID NO: 188 - protein, 257 aa, Staphylococcus aureus
MKKTAFILLLFIALTLTTSPLVNGSEKSEEINEKDLRKKSELQRNALSNLRQIYYYNEKAITENKESDDQFLENTLLFKGFFTGHPWYNDLLVDLGSKDATNKYKGKKVDLYGAYYGYQCAGGTPNKTACMYGGVTLHDNNRLTEEKKVPINLWIDGKQTTVPIDKVKTSKKEVTVQELDLQARHYLHGKFGLYNSDSFGGKVQRGLIVFHSSEGSTVSYDLFDAQGQYPDTLLRIYRDNKTINSENLHIDLYLYTT

SEQ ID NO: 189 - protein, 234 aa, Staphylococcus aureus; identical to SEQ ID NO: 14

SEQ ID NO: 190 - protein, 231 aa, Staphylococcus aureus
MKLKTLAKATLALSLLTTGVITLESQAVKAAEKQERVQHLYDIKDLYRYYSAPSFEYSNISGKVENYNGSNVVRFNQKDQNHQLFLLGKDKEQYKEGLQGKDVFVVQELIDPNGRLSTVGGVTKKNNKTSETKTHLLVNKVDGGNLDASIDSFLIQKEEISLKELDFKIRQQLVEKYGLYQGTSKYGKITINLKDEKREVIDLSDKLEFERMGDVLNSKDIKGISVTINQI

SEQ ID NO: 191 - protein, 231 aa, Staphylococcus aureus
MKLKTLAKATLALGLLTTGVITSEGQAVQAAEKQERVQHLHDIRDLHRYYSSESFEYSNVSGKVENYNGSNVVRFNPKDQNHQLFLLGKDKEQYKEGLQGQNVFVVQELIDPNGRLSTVGGVTKKNNKTSETNTPLFVNKVNGEDLDASIDSFLIQKEEISLKELDFKIRQQLVNNYGLYKGTSKYGKIIINLKDENKVEIDLGDKLQFERMGDVLNSKDIRGISVTINQI

SEQ ID NO: 192 - protein, 234 aa, Staphylococcus aureus
MKMTAIAKASLALSILATGVITSTAQTVNASEHESKYENVTKDIFDLRDYYSRASKELKNVTGYRYSKGGKHYLIFDKNRKFTRIQIFGKDIERIKKRKNPGLDIFVVKEAENRNGTVYSYGGVTKKNQGAYYDYLSAPRFVIKKEVGAGVSVHVKRYYIYKEEISLKELDFKLRQYLIQDFDLYKKFPKASKIKVTMKDGGYYTFELNKKLQTNRMSDVIDGRNIEKIEANIR

SEQ ID NO: 193 - protein, 227 aa, Staphylococcus aureus
MKLTALAKVTLALGILTTGTLTTEAHSGHAKQNQKSVNKHDKEALHRYYTGNFKEMKNINALRHGKNNLRFKYRGMKTQVLLPGDEYRKYQQRRHTGLDVFFVQERRDKHDISYTVGGVTKTNKTSGFVSTPRLNVTKEKGEDAFVKGYPYDIKKEEISLKELDFKLRKHLIEKYGLYKTLSKDGRIKISLKDGSFYNLDLRTKLKFKHMGEVIDSKQIKDIEVNLK

SEQ ID NO: 194 - protein, 232 aa, Staphylococcus aureus
MKLTAIAKATLALGILTTGVMTAESQTVNAKVKLDETQRKYYINMLKDYYSQESYESTNISVKSEDYYGSNVLNFNQRNKNFKVFLIGDDRNKYKELTHGRDVFAVPELIDTKGGIYSVGGITKKNVRSVFGYVSHPGLQVKKVDPKDGFSIKELFFIQKEEVSLKELDFKIRKMLVEKYRLYKGASDKGRIVINMKDEKKHEIDLSEKLSFDRMFDVLDSKQIKNIEVNLN

SEQ ID NO: 195 - DNA, 24 bp, Unknown
  primer
ccccatatgcaacaagaccccgat

SEQ ID NO: 196 - DNA, 24 bp, Unknown
  primer
gggggatccttacttggttgttag

SEQ ID NO: 197 - DNA, 32 bp, Unknown
  primer
agtcaaccagatcctacgccagaacaattgaa

SEQ ID NO: 198 - DNA, 29 bp, Unknown
  primer
aaatcgagtcaatttacggagttatggcc

SEQ ID NO: 199 - DNA, 24 bp, Unknown
  primer
tgggatccttagaagtagataata

SEQ ID NO: 200 - DNA, 23 bp, Unknown
  primer
aagaattcttaggagtcaatttc

SEQ ID NO: 201 - DNA, 30 bp, Unknown
  primer
ctggatccgatgaaaatttaaaagatttaa

SEQ ID NO: 202 - DNA, 21 bp, Unknown
  primer
aagaattcggggggagaatag

SEQ ID NO: 203 - DNA, 26 bp, Unknown
  primer
ttggatccaattcttataatacaacc

SEQ ID NO: 204 - DNA, 23 bp, Unknown
  primer
aaaagcttttagctgattgacac

SEQ ID NO: 205 - DNA, 31 bp, Unknown
  primer
gggacagaataatactatgaaattaaaaacg

SEQ ID NO: 206 - DNA, 21 bp, Unknown
  primer
atctttttggttaaagcgtac

SEQ ID NO: 207 - DNA, 28 bp, Unknown
  primer
gaattcagattgggagaataatactatg

SEQ ID NO: 208 - DNA, 28 bp, Unknown
  primer
agatctcaacgtttcatcgttaagctgc

SEQ ID NO: 209 - DNA, 28 bp, Unknown
  primer
ggatccgcagaaaaacaagagagagtac

SEQ ID NO: 210 - DNA, 27 bp, Unknown
  primer
gtcgacaacgtttcacgttaagctgcc

SEQ ID NO: 211 - DNA, 21 bp, Unknown
  primer
caggaagtgttgctactgcaa

SEQ ID NO: 212 - DNA, 22 bp, Unknown
  primer
caacacttcctgtagctgcatg

SEQ ID NO: 213 - protein, 28 aa, Yersinia pseudotuberculosis
  MISC_FEATURE (2)..(2): Xaa can be Ile or Asp
TXYDNTLNSIPSLRIPNATYTGTIGKGE

SEQ ID NO: 214 - protein, 22 aa, Homo sapiens
RSQSRSRYYRQRQRSRRRRRRS

SEQ ID NO: 215 - protein, 46 aa, Artificial Sequence
  Synthetic peptide
KKKKKKKKKKKKKKKKGGCRGDMFGCAKKKKKKKKKKKKKKKKRGD

SEQ ID NO: 216 - DNA, 39 bp, Unknown
  primer
ggtaccaaggacgcctgcgcgggtgacagcggtggccca

SEQ ID NO: 217 - DNA, 39 bp, Unknown
  primer
tgggccaccgctgtcacccgcgcaggcgtccttggtacc

SEQ ID NO: 218 - DNA, 38 bp, Unknown
  primer
acgatcttaagcttccccacagtctcatcatggttcca

SEQ ID NO: 219 - DNA, 38 bp, Unknown
  primer
acggtaacggatcccagtagtgggagtcggaaaacccc

SEQ ID NO: 220 - DNA, 39 bp, Unknown; identical to SEQ ID NO: 216
  primer

SEQ ID NO: 221 - DNA, 39 bp, Unknown; identical to SEQ ID NO: 217
  primer

SEQ ID NO: 222 - protein, 9 aa, Murinae gen. sp.
SPSYVYHQF

SEQ ID NO: 223 - DNA, 25 bp, Unknown
  primer
tttagaagatgaaccgtaagcctag

SEQ ID NO: 224 - DNA, 21 bp, Unknown
  primer
gatacctctttcgtctgctga

What is claimed is:

1. A method of treating a subject having a tumor or malignant mass comprising administering intratumorally to said subject a tumoricidally effective amount of a superantigen composition comprising a superantigen or a superantigen-like exotoxin.

2. The method of claim 1 wherein the superantigen or exotoxin is selected from the group consisting of a Staphylococcal enterotoxin, a Streptococcal pyrogenic exotoxin, Yersinia pseudotuberculosis superantigen, Mycoplasma arthritides superantigen, and Clostridium perfringens superantigen-like exotoxin.

3. A method of treating a subject having a tumor comprising administering intratumorally to said subject a tumoricidally effective amount of a superantigen composition which comprises:
(a) a biologically active fragment of a full-length Staphylococcal enterotoxin, a Streptococcal pyrogenic exotoxin, Yersinia pseudotuberculosis superantigen, Mycoplasma arthritides superantigen, and Clostridium perfringens superantigen-like exotoxin;
(b) a biologically active homologue of a Staphylococcal enterotoxin, a Streptococcal pyrogenic exotoxin, Yersinia pseudotuberculosis superantigen, Mycoplasma arthritides superantigen, and Clostridium perfringens superantigen-like exotoxin,
(c) a biologically active fusion polypeptide comprising a superantigen sequence of (1) said full length superantigen or exotoxin, (2) said fragment or (3) said homologue which is fused to a fusion partner polypeptide sequence;
wherein:
(i) the fragment, homologue or fusion polypeptide has the biological activity of (A) stimulating T cells or (B) stimulating T cells via a T cell receptor Vβ region; and
(ii) the homologue has the following sequence homology or identity compared to the native superantigen or exotoxin:
(A) at least 20% amino acid sequence identity as measured using a sequence comparison algorithm; or
(B) sequence homology characterized as a z value exceeding 10 using an algorithm and Monte Carlo analysis according to W. R. Pearson and D. J. Lipman in the Proceedings of the National Academy of Science U.S.A., 85:2444-2448, 1988, when the sequence of the homologue is compared to the sequence of a native Staphylococcal enterotoxin, a Streptococcal pyrogenic exotoxin, Yersinia pseudotuberculosis superantigen, Mycoplasma arthritides superantigen, and Clostridium perfringens superantigen-like exotoxin; or
(C) has sequence homology characterized as a z value exceeding 10 using the FASTA/FASTP programs and Monte Carlo of Pearson and Lipman when compared to a native Staphylococcal enterotoxin, a Streptococcal pyrogenic exotoxin, Yersinia pseudotuberculosis superantigen, Mycoplasma arthritides superantigen, and Clostridium perfringens superantigen-like exotoxin

4. The method of claim of any of claims 1-3 wherein the superantigen composition is administered in a sustained release vehicle.

5. The method of claim 4 wherein the sustained release vehicle is selected from a group consisting of poly (D-, L- or DL-lactic acid/polyglycolide) polymer, ethylene-vinyl acetate, a bioerodible polyanhydride, a polyimino carbonate, sodium alginate microspheres, a hydrogel, a biodegradable amphipathic copolymer, and a collagen-poly (hema) hydrogel matrix.

6. The method of any of claims 1-3 further comprising administering one or more chemotherapeutic drugs or prodrugs together with or after administration of said superantigen composition, wherein the chemotherapeutic drug or prodrug is or are given in a dose which is lower than a therapeutically effective dose of said drug or prodrug, which therapeutically effective dose is based on administration of said drug or prodrug in monotherapy or in combination therapy but without said superantigen composition.

7. The method of claim 4 further comprising administering one or more chemotherapeutic drugs or prodrugs together with or after administration of said superantigen composition, wherein the chemotherapeutic drug or prodrug is or are given in a dose which is lower than a therapeutically effective dose of said drug or prodrug, which therapeutically effective dose is based on administration of said drug or prodrug in monotherapy or in combination therapy but without said superantigen composition.

8. The method claim 6 wherein the chemotherapeutic drug is administered in a dose that is 10-95% below said therapeutically effective dose.

9. The method claim 7 wherein the chemotherapeutic drug is administered in a dose that is 10-95% below said therapeutically effective dose.

10. The method of claim 6 wherein said drug bis given within the 36 hours after the intratumoral administration of the superantigen composition.

11. The method of claim 7 wherein said drug bis given within the 36 hours after the intratumoral administration of the superantigen composition.

12. The method of claim 8 wherein said drug is first administered after the superantigen composition has been administered for two to four doses.

13. The method of claim 9 wherein said drug is first administered after the superantigen composition has been administered for two to four doses.

14. The method claim 6 wherein the chemotherapeutic drug is selected from the group consisting of an antimetabolite, a pyrimidine analogue, a purine analogue, an anthracycline, a vinca alkaloid, an anti-tubulin drug, an antibiotic, an alkylating agent, an epipodophyllotoxin, and a platinum-based agent.

15. The method claim 7 wherein the chemotherapeutic drug is selected from the group consisting of an antimetabolite, a pyrimidine analogue, a purine analogue, an anthracycline, a vinca alkaloid, an anti-tubulin drug, an antibiotic, an alkylating agent, an epipodophyllotoxin, and a platinum-based agent.

16. The method of any of claims 1-3 further comprising administering to the subject after the intratumoral administration of the superantigen composition, one or more additional cancer therapeutic agents selected from the group consisting of (a) a radiotherapeutic agent, (b) an antiangiogenic agent, (c) a cytotoxin, (d) an apoptosis-inducing agent, or (e) tumor-targeted form of any of (a)-(d).
